United States Patent Application Publication US 2022/0136013 A1 - sequence listing, part 2

SEQ ID NO: 33382 - RNA, 22 nt, Artificial Sequence
  Guide RNA
guaaaaggauaguguuugcauc

SEQ ID NO: 33383 - RNA, 22 nt, Artificial Sequence
  Guide RNA
guccuccagaugcaaacacuau

SEQ ID NO: 33384 - RNA, 22 nt, Artificial Sequence
  Guide RNA
guccucuagaugcaaacacuau

SEQ ID NO: 33385 - RNA, 22 nt, Artificial Sequence
  Guide RNA
gucucuaguccuccagaugcaa

SEQ ID NO: 33386 - RNA, 22 nt, Artificial Sequence
  Guide RNA
gucucuaguccucuagaugcaa

SEQ ID NO: 33387 - RNA, 22 nt, Artificial Sequence
  Guide RNA
gugcaggcaugucucuaguccu

SEQ ID NO: 33388 - RNA, 22 nt, Artificial Sequence
  Guide RNA
guguuugcaucuagaggacuag

SEQ ID NO: 33389 - RNA, 22 nt, Artificial Sequence
  Guide RNA
guguuugcaucuggaggacuag

SEQ ID NO: 33390 - RNA, 22 nt, Artificial Sequence
  Guide RNA
guuugcaucuagaggacuagag

SEQ ID NO: 33391 - RNA, 22 nt, Artificial Sequence
  Guide RNA
guuugcaucuggaggacuagag

SEQ ID NO: 33392 - RNA, 22 nt, Artificial Sequence
  Guide RNA
uaaaaggauaguguuugcaucu

SEQ ID NO: 33393 - RNA, 22 nt, Artificial Sequence
  Guide RNA
uagaggacuagagacaugccug

SEQ ID NO: 33394 - RNA, 22 nt, Artificial Sequence
  Guide RNA
uaguccuccagaugcaaacacu

SEQ ID NO: 33395 - RNA, 22 nt, Artificial Sequence
  Guide RNA
uaguccucuagaugcaaacacu

SEQ ID NO: 33396 - RNA, 22 nt, Artificial Sequence
  Guide RNA
uaguguuugcaucuagaggacu

SEQ ID NO: 33397 - RNA, 22 nt, Artificial Sequence
  Guide RNA
uaguguuugcaucuggaggacu

SEQ ID NO: 33398 - RNA, 22 nt, Artificial Sequence
  Guide RNA
uccagaugcaaacacuauccuu

SEQ ID NO: 33399 - RNA, 22 nt, Artificial Sequence
  Guide RNA
uccuccagaugcaaacacuauc

SEQ ID NO: 33400 - RNA, 22 nt, Artificial Sequence
  Guide RNA
uccucuagaugcaaacacuauc

SEQ ID NO: 33401 - RNA, 22 nt, Artificial Sequence
  Guide RNA
ucuagaggacuagagacaugcc

SEQ ID NO: 33402 - RNA, 22 nt, Artificial Sequence
  Guide RNA
ucuagaugcaaacacuauccuu

SEQ ID NO: 33403 - RNA, 22 nt, Artificial Sequence
  Guide RNA
ucuaguccuccagaugcaaaca

SEQ ID NO: 33404 - RNA, 22 nt, Artificial Sequence
  Guide RNA
ucuaguccucuagaugcaaaca

SEQ ID NO: 33405 - RNA, 22 nt, Artificial Sequence
  Guide RNA
ucucuaguccuccagaugcaaa

SEQ ID NO: 33406 - RNA, 22 nt, Artificial Sequence
  Guide RNA
ucucuaguccucuagaugcaaa

SEQ ID NO: 33407 - RNA, 22 nt, Artificial Sequence
  Guide RNA
ucuggaggacuagagacaugcc

SEQ ID NO: 33408 - RNA, 22 nt, Artificial Sequence
  Guide RNA
ugcaggcaugucucuaguccuc

SEQ ID NO: 33409 - RNA, 22 nt, Artificial Sequence
  Guide RNA
ugcaucuagaggacuagagaca

SEQ ID NO: 33410 - RNA, 22 nt, Artificial Sequence
  Guide RNA
ugcaucuggaggacuagagaca

SEQ ID NO: 33411 - RNA, 22 nt, Artificial Sequence
  Guide RNA
uggaggacuagagacaugccug

SEQ ID NO: 33412 - RNA, 22 nt, Artificial Sequence
  Guide RNA
uguaaaaggauaguguuugcau

SEQ ID NO: 33413 - RNA, 22 nt, Artificial Sequence
  Guide RNA
ugucucuaguccuccagaugca

SEQ ID NO: 33414 - RNA, 22 nt, Artificial Sequence
  Guide RNA
ugucucuaguccucuagaugca

SEQ ID NO: 33415 - RNA, 22 nt, Artificial Sequence
  Guide RNA
ugugcaggcaugucucuagucc

SEQ ID NO: 33416 - RNA, 22 nt, Artificial Sequence
  Guide RNA
uguuugcaucuagaggacuaga

SEQ ID NO: 33417 - RNA, 22 nt, Artificial Sequence
  Guide RNA
uguuugcaucuggaggacuaga

SEQ ID NO: 33418 - RNA, 22 nt, Artificial Sequence
  Guide RNA
uugcaucuagaggacuagagac

SEQ ID NO: 33419 - RNA, 22 nt, Artificial Sequence
  Guide RNA
uugcaucuggaggacuagagac

SEQ ID NO: 33420 - RNA, 22 nt, Artificial Sequence
  Guide RNA
uuugcaucuagaggacuagaga

SEQ ID NO: 33421 - RNA, 22 nt, Artificial Sequence
  Guide RNA
uuugcaucuggaggacuagaga

SEQ ID NO: 33422 - RNA, 20 nt, Artificial Sequence
  Guide RNA
aagaggccuuacacacucca

SEQ ID NO: 33423 - RNA, 20 nt, Artificial Sequence
  Guide RNA
aagaggccuuacacacuccg

SEQ ID NO: 33424 - RNA, 20 nt, Artificial Sequence
  Guide RNA
acacacuccacucucaaaac

SEQ ID NO: 33425 - RNA, 20 nt, Artificial Sequence
  Guide RNA
acacacuccgcucucaaaac

SEQ ID NO: 33426 - RNA, 20 nt, Artificial Sequence
  Guide RNA
acacuccacucucaaaaccc

SEQ ID NO: 33427 - RNA, 20 nt, Artificial Sequence
  Guide RNA
acacuccgcucucaaaaccc

SEQ ID NO: 33428 - RNA, 20 nt, Artificial Sequence
  Guide RNA
acuccacucucaaaacccug

SEQ ID NO: 33429 - RNA, 20 nt, Artificial Sequence
  Guide RNA
acuccgcucucaaaacccug

SEQ ID NO: 33430 - RNA, 20 nt, Artificial Sequence
  Guide RNA
agagcggaguguguaaggcc

SEQ ID NO: 33431 - RNA, 20 nt, Artificial Sequence
  Guide RNA
agaggccuuacacacuccac

SEQ ID NO: 33432 - RNA, 20 nt, Artificial Sequence
  Guide RNA
agaggccuuacacacuccgc

SEQ ID NO: 33433 - RNA, 20 nt, Artificial Sequence
  Guide RNA
agaguggaguguguaaggcc

SEQ ID NO: 33434 - RNA, 20 nt, Artificial Sequence
  Guide RNA
agcggaguguguaaggccuc

SEQ ID NO: 33435 - RNA, 20 nt, Artificial Sequence
  Guide RNA
aggccuuacacacuccacuc

SEQ ID NO: 33436 - RNA, 20 nt, Artificial Sequence
  Guide RNA
aggccuuacacacuccgcuc

SEQ ID NO: 33437 - RNA, 20 nt, Artificial Sequence
  Guide RNA
aggcugggcaggguuuugag

SEQ ID NO: 33438 - RNA, 20 nt, Artificial Sequence
  Guide RNA
aggguuuugagagcggagug

SEQ ID NO: 33439 - RNA, 20 nt, Artificial Sequence
  Guide RNA
aggguuuugagaguggagug

SEQ ID NO: 33440 - RNA, 20 nt, Artificial Sequence
  Guide RNA
aguggaguguguaaggccuc

SEQ ID NO: 33441 - RNA, 20 nt, Artificial Sequence
  Guide RNA
caagaggccuuacacacucc

SEQ ID NO: 33442 - RNA, 20 nt, Artificial Sequence
  Guide RNA
cacacuccacucucaaaacc

SEQ ID NO: 33443 - RNA, 20 nt, Artificial Sequence
  Guide RNA
cacacuccgcucucaaaacc

SEQ ID NO: 33444 - RNA, 20 nt, Artificial Sequence
  Guide RNA
cacuccacucucaaaacccu

SEQ ID NO: 33445 - RNA, 20 nt, Artificial Sequence
  Guide RNA
cacuccgcucucaaaacccu

SEQ ID NO: 33446 - RNA, 20 nt, Artificial Sequence
  Guide RNA
cacucucaaaacccugccca

SEQ ID NO: 33447 - RNA, 20 nt, Artificial Sequence
  Guide RNA
caggguuuugagagcggagu

SEQ ID NO: 33448 - RNA, 20 nt, Artificial Sequence
  Guide RNA
caggguuuugagaguggagu

SEQ ID NO: 33449 - RNA, 20 nt, Artificial Sequence
  Guide RNA
ccacucucaaaacccugccc

SEQ ID NO: 33450 - RNA, 20 nt, Artificial Sequence
  Guide RNA
ccgcucucaaaacccugccc

SEQ ID NO: 33451 - RNA, 20 nt, Artificial Sequence
  Guide RNA
ccucaagaggccuuacacac

SEQ ID NO: 33452 - RNA, 20 nt, Artificial Sequence
  Guide RNA
ccuuacacacuccacucuca

SEQ ID NO: 33453 - RNA, 20 nt, Artificial Sequence
  Guide RNA
ccuuacacacuccgcucuca

SEQ ID NO: 33454 - RNA, 20 nt, Artificial Sequence
  Guide RNA
cgcucucaaaacccugccca

SEQ ID NO: 33455 - RNA, 20 nt, Artificial Sequence
  Guide RNA
cucaagaggccuuacacacu

SEQ ID NO: 33456 - RNA, 20 nt, Artificial Sequence
  Guide RNA
cuccacucucaaaacccugc

SEQ ID NO: 33457 - RNA, 20 nt, Artificial Sequence
  Guide RNA
cuccgcucucaaaacccugc

SEQ ID NO: 33458 - RNA, 20 nt, Artificial Sequence
  Guide RNA
cugggcaggguuuugagagc

SEQ ID NO: 33459 - RNA, 20 nt, Artificial Sequence
  Guide RNA
cugggcaggguuuugagagu

SEQ ID NO: 33460 - RNA, 20 nt, Artificial Sequence
  Guide RNA
cuuacacacuccacucucaa

SEQ ID NO: 33461 - RNA, 20 nt, Artificial Sequence
  Guide RNA
cuuacacacuccgcucucaa

SEQ ID NO: 33462 - RNA, 20 nt, Artificial Sequence
  Guide RNA
gagagcggaguguguaaggc

SEQ ID NO: 33463 - RNA, 20 nt, Artificial Sequence
  Guide RNA
gagaguggaguguguaaggc

SEQ ID NO: 33464 - RNA, 20 nt, Artificial Sequence
  Guide RNA
gagcggaguguguaaggccu

SEQ ID NO: 33465 - RNA, 20 nt, Artificial Sequence
  Guide RNA
gaggccuuacacacuccacu

SEQ ID NO: 33466 - RNA, 20 nt, Artificial Sequence
  Guide RNA
gaggccuuacacacuccgcu

SEQ ID NO: 33467 - RNA, 20 nt, Artificial Sequence
  Guide RNA
gaggcugggcaggguuuuga

SEQ ID NO: 33468 - RNA, 20 nt, Artificial Sequence
  Guide RNA
gaguggaguguguaaggccu

SEQ ID NO: 33469 - RNA, 20 nt, Artificial Sequence
  Guide RNA
gcaggguuuugagagcggag

SEQ ID NO: 33470 - RNA, 20 nt, Artificial Sequence
  Guide RNA
gcaggguuuugagaguggag

SEQ ID NO: 33471 - RNA, 20 nt, Artificial Sequence
  Guide RNA
gccuuacacacuccacucuc

SEQ ID NO: 33472 - RNA, 20 nt, Artificial Sequence
  Guide RNA
gccuuacacacuccgcucuc

SEQ ID NO: 33473 - RNA, 20 nt, Artificial Sequence
  Guide RNA
gcggaguguguaaggccucu

SEQ ID NO: 33474 - RNA, 20 nt, Artificial Sequence
  Guide RNA
gcugggcaggguuuugagag

SEQ ID NO: 33475 - RNA, 20 nt, Artificial Sequence
  Guide RNA
ggcaggguuuugagagcgga

SEQ ID NO: 33476 - RNA, 20 nt, Artificial Sequence
  Guide RNA
ggcaggguuuugagagugga

SEQ ID NO: 33477 - RNA, 20 nt, Artificial Sequence
  Guide RNA
ggccuuacacacuccacucu

SEQ ID NO: 33478 - RNA, 20 nt, Artificial Sequence
  Guide RNA
ggccuuacacacuccgcucu

SEQ ID NO: 33479 - RNA, 20 nt, Artificial Sequence
  Guide RNA
ggcugggcaggguuuugaga

SEQ ID NO: 33480 - RNA, 20 nt, Artificial Sequence
  Guide RNA
gggcaggguuuugagagcgg

SEQ ID NO: 33481 - RNA, 20 nt, Artificial Sequence
  Guide RNA
gggcaggguuuugagagugg

SEQ ID NO: 33482 - RNA, 20 nt, Artificial Sequence
  Guide RNA
ggguuuugagagcggagugu

SEQ ID NO: 33483 - RNA, 20 nt, Artificial Sequence
  Guide RNA
ggguuuugagaguggagugu

SEQ ID NO: 33484 - RNA, 20 nt, Artificial Sequence
  Guide RNA
gguuuugagagcggagugug

SEQ ID NO: 33485 - RNA, 20 nt, Artificial Sequence
  Guide RNA
gguuuugagaguggagugug

SEQ ID NO: 33486 - RNA, 20 nt, Artificial Sequence
  Guide RNA
guggaguguguaaggccucu

SEQ ID NO: 33487 - RNA, 20 nt, Artificial Sequence
  Guide RNA
guuuugagagcggagugugu

SEQ ID NO: 33488 - RNA, 20 nt, Artificial Sequence
  Guide RNA
guuuugagaguggagugugu

SEQ ID NO: 33489 - RNA, 20 nt, Artificial Sequence
  Guide RNA
uacacacuccacucucaaaa

SEQ ID NO: 33490 - RNA, 20 nt, Artificial Sequence
  Guide RNA
uacacacuccgcucucaaaa

SEQ ID NO: 33491 - RNA, 20 nt, Artificial Sequence
  Guide RNA
ucaagaggccuuacacacuc

SEQ ID NO: 33492 - RNA, 20 nt, Artificial Sequence
  Guide RNA
uccacucucaaaacccugcc

SEQ ID NO: 33493 - RNA, 20 nt, Artificial Sequence
  Guide RNA
uccgcucucaaaacccugcc

SEQ ID NO: 33494 - RNA, 20 nt, Artificial Sequence
  Guide RNA
ugagagcggaguguguaagg

SEQ ID NO: 33495 - RNA, 20 nt, Artificial Sequence
  Guide RNA
ugagaguggaguguguaagg

SEQ ID NO: 33496 - RNA, 20 nt, Artificial Sequence
  Guide RNA
ugggcaggguuuugagagcg

SEQ ID NO: 33497 - RNA, 20 nt, Artificial Sequence
  Guide RNA
ugggcaggguuuugagagug

SEQ ID NO: 33498 - RNA, 20 nt, Artificial Sequence
  Guide RNA
uuacacacuccacucucaaa

SEQ ID NO: 33499 - RNA, 20 nt, Artificial Sequence
  Guide RNA
uuacacacuccgcucucaaa

SEQ ID NO: 33500 - RNA, 20 nt, Artificial Sequence
  Guide RNA
uugagagcggaguguguaag

SEQ ID NO: 33501 - RNA, 20 nt, Artificial Sequence
  Guide RNA
uugagaguggaguguguaag

SEQ ID NO: 33502 - RNA, 20 nt, Artificial Sequence
  Guide RNA
uuugagagcggaguguguaa

SEQ ID NO: 33503 - RNA, 20 nt, Artificial Sequence
  Guide RNA
uuugagaguggaguguguaa

SEQ ID NO: 33504 - RNA, 20 nt, Artificial Sequence
  Guide RNA
uuuugagagcggagugugua

SEQ ID NO: 33505 - RNA, 20 nt, Artificial Sequence
  Guide RNA
uuuugagaguggagugugua

SEQ ID NO: 33506 - RNA, 21 nt, Artificial Sequence
  Guide RNA
aagaggccuuacacacuccac

SEQ ID NO: 33507 - RNA, 21 nt, Artificial Sequence
  Guide RNA
aagaggccuuacacacuccgc

SEQ ID NO: 33508 - RNA, 21 nt, Artificial Sequence
  Guide RNA
acacacuccacucucaaaacc

SEQ ID NO: 33509 - RNA, 21 nt, Artificial Sequence
  Guide RNA
acacacuccgcucucaaaacc

SEQ ID NO: 33510 - RNA, 21 nt, Artificial Sequence
  Guide RNA
acacuccacucucaaaacccu

SEQ ID NO: 33511 - RNA, 21 nt, Artificial Sequence
  Guide RNA
acacuccgcucucaaaacccu

SEQ ID NO: 33512 - RNA, 21 nt, Artificial Sequence
  Guide RNA
acuccacucucaaaacccugc

SEQ ID NO: 33513 - RNA, 21 nt, Artificial Sequence
  Guide RNA
acuccgcucucaaaacccugc

SEQ ID NO: 33514 - RNA, 21 nt, Artificial Sequence
  Guide RNA
agagcggaguguguaaggccu

SEQ ID NO: 33515 - RNA, 21 nt, Artificial Sequence
  Guide RNA
agaggccuuacacacuccacu

SEQ ID NO: 33516 - RNA, 21 nt, Artificial Sequence
  Guide RNA
agaggccuuacacacuccgcu

SEQ ID NO: 33517 - RNA, 21 nt, Artificial Sequence
  Guide RNA
agaguggaguguguaaggccu

SEQ ID NO: 33518 - RNA, 21 nt, Artificial Sequence
  Guide RNA
agcggaguguguaaggccucu

SEQ ID NO: 33519 - RNA, 21 nt, Artificial Sequence
  Guide RNA
aggccuuacacacuccacucu

SEQ ID NO: 33520 - RNA, 21 nt, Artificial Sequence
  Guide RNA
aggccuuacacacuccgcucu

SEQ ID NO: 33521 - RNA, 21 nt, Artificial Sequence
  Guide RNA
aggcugggcaggguuuugaga

SEQ ID NO: 33522 - RNA, 21 nt, Artificial Sequence
  Guide RNA
aggguuuugagagcggagugu

SEQ ID NO: 33523 - RNA, 21 nt, Artificial Sequence
  Guide RNA
aggguuuugagaguggagugu

SEQ ID NO: 33524 - RNA, 21 nt, Artificial Sequence
  Guide RNA
aguggaguguguaaggccucu

SEQ ID NO: 33525 - RNA, 21 nt, Artificial Sequence
  Guide RNA
caagaggccuuacacacucca

SEQ ID NO: 33526 - RNA, 21 nt, Artificial Sequence
  Guide RNA
caagaggccuuacacacuccg

SEQ ID NO: 33527 - RNA, 21 nt, Artificial Sequence
  Guide RNA
cacacuccacucucaaaaccc

SEQ ID NO: 33528 - RNA, 21 nt, Artificial Sequence
  Guide RNA
cacacuccgcucucaaaaccc

SEQ ID NO: 33529 - RNA, 21 nt, Artificial Sequence
  Guide RNA
cacuccacucucaaaacccug

SEQ ID NO: 33530 - RNA, 21 nt, Artificial Sequence
  Guide RNA
cacuccgcucucaaaacccug

SEQ ID NO: 33531 - RNA, 21 nt, Artificial Sequence
  Guide RNA
cacucucaaaacccugcccag

SEQ ID NO: 33532 - RNA, 21 nt, Artificial Sequence
  Guide RNA
caggguuuugagagcggagug

SEQ ID NO: 33533 - RNA, 21 nt, Artificial Sequence
  Guide RNA
caggguuuugagaguggagug

SEQ ID NO: 33534 - RNA, 21 nt, Artificial Sequence
  Guide RNA
ccacucucaaaacccugccca

SEQ ID NO: 33535 - RNA, 21 nt, Artificial Sequence
  Guide RNA
ccgcucucaaaacccugccca

SEQ ID NO: 33536 - RNA, 21 nt, Artificial Sequence
  Guide RNA
ccucaagaggccuuacacacu

SEQ ID NO: 33537 - RNA, 21 nt, Artificial Sequence
  Guide RNA
ccuuacacacuccacucucaa

SEQ ID NO: 33538 - RNA, 21 nt, Artificial Sequence
  Guide RNA
ccuuacacacuccgcucucaa

SEQ ID NO: 33539 - RNA, 21 nt, Artificial Sequence
  Guide RNA
cgcucucaaaacccugcccag

SEQ ID NO: 33540 - RNA, 21 nt, Artificial Sequence
  Guide RNA
cucaagaggccuuacacacuc

SEQ ID NO: 33541 - RNA, 21 nt, Artificial Sequence
  Guide RNA
cuccacucucaaaacccugcc

SEQ ID NO: 33542 - RNA, 21 nt, Artificial Sequence
  Guide RNA
cuccgcucucaaaacccugcc

SEQ ID NO: 33543 - RNA, 21 nt, Artificial Sequence
  Guide RNA
cugggcaggguuuugagagcg

SEQ ID NO: 33544 - RNA, 21 nt, Artificial Sequence
  Guide RNA
cugggcaggguuuugagagug

SEQ ID NO: 33545 - RNA, 21 nt, Artificial Sequence
  Guide RNA
cuuacacacuccacucucaaa

SEQ ID NO: 33546 - RNA, 21 nt, Artificial Sequence
  Guide RNA
cuuacacacuccgcucucaaa

SEQ ID NO: 33547 - RNA, 21 nt, Artificial Sequence
  Guide RNA
gagagcggaguguguaaggcc

SEQ ID NO: 33548 - RNA, 21 nt, Artificial Sequence
  Guide RNA
gagaguggaguguguaaggcc

SEQ ID NO: 33549 - RNA, 21 nt, Artificial Sequence
  Guide RNA
gagcggaguguguaaggccuc

SEQ ID NO: 33550 - RNA, 21 nt, Artificial Sequence
  Guide RNA
gaggccuuacacacuccacuc

SEQ ID NO: 33551 - RNA, 21 nt, Artificial Sequence
  Guide RNA
gaggccuuacacacuccgcuc

SEQ ID NO: 33552 - RNA, 21 nt, Artificial Sequence
  Guide RNA
gaggcugggcaggguuuugag

SEQ ID NO: 33553 - RNA, 21 nt, Artificial Sequence
  Guide RNA
gaguggaguguguaaggccuc

SEQ ID NO: 33554 - RNA, 21 nt, Artificial Sequence
  Guide RNA
gcaggguuuugagagcggagu

SEQ ID NO: 33555 - RNA, 21 nt, Artificial Sequence
  Guide RNA
gcaggguuuugagaguggagu

SEQ ID NO: 33556 - RNA, 21 nt, Artificial Sequence
  Guide RNA
gccucaagaggccuuacacac

SEQ ID NO: 33557 - RNA, 21 nt, Artificial Sequence
  Guide RNA
gccuuacacacuccacucuca

SEQ ID NO: 33558 - RNA, 21 nt, Artificial Sequence
  Guide RNA
gccuuacacacuccgcucuca

SEQ ID NO: 33559 - RNA, 21 nt, Artificial Sequence
  Guide RNA
gcggaguguguaaggccucuu

SEQ ID NO: 33560 - RNA, 21 nt, Artificial Sequence
  Guide RNA
gcugggcaggguuuugagagc

SEQ ID NO: 33561 - RNA, 21 nt, Artificial Sequence
  Guide RNA
gcugggcaggguuuugagagu

SEQ ID NO: 33562 - RNA, 21 nt, Artificial Sequence
  Guide RNA
ggaggcugggcaggguuuuga

SEQ ID NO: 33563 - RNA, 21 nt, Artificial Sequence
  Guide RNA
ggcaggguuuugagagcggag

SEQ ID NO: 33564 - RNA, 21 nt, Artificial Sequence
  Guide RNA
ggcaggguuuugagaguggag

SEQ ID NO: 33565 - RNA, 21 nt, Artificial Sequence
  Guide RNA
ggccuuacacacuccacucuc

SEQ ID NO: 33566 - RNA, 21 nt, Artificial Sequence
  Guide RNA
ggccuuacacacuccgcucuc

SEQ ID NO: 33567 - RNA, 21 nt, Artificial Sequence
  Guide RNA
ggcugggcaggguuuugagag

SEQ ID NO: 33568 - RNA, 21 nt, Artificial Sequence
  Guide RNA
gggcaggguuuugagagcgga

SEQ ID NO: 33569 - RNA, 21 nt, Artificial Sequence
  Guide RNA
gggcaggguuuugagagugga

SEQ ID NO: 33570 - RNA, 21 nt, Artificial Sequence
  Guide RNA
ggguuuugagagcggagugug

SEQ ID NO: 33571 - RNA, 21 nt, Artificial Sequence
  Guide RNA
ggguuuugagaguggagugug

SEQ ID NO: 33572 - RNA, 21 nt, Artificial Sequence
  Guide RNA
gguuuugagagcggagugugu

SEQ ID NO: 33573 - RNA, 21 nt, Artificial Sequence
  Guide RNA
gguuuugagaguggagugugu

SEQ ID NO: 33574 - RNA, 21 nt, Artificial Sequence
  Guide RNA
guggaguguguaaggccucuu

SEQ ID NO: 33575 - RNA, 21 nt, Artificial Sequence
  Guide RNA
guuuugagagcggagugugua

SEQ ID NO: 33576 - RNA, 21 nt, Artificial Sequence
  Guide RNA
guuuugagaguggagugugua

SEQ ID NO: 33577 - RNA, 21 nt, Artificial Sequence
  Guide RNA
uacacacuccacucucaaaac

SEQ ID NO: 33578 - RNA, 21 nt, Artificial Sequence
  Guide RNA
uacacacuccgcucucaaaac

SEQ ID NO: 33579 - RNA, 21 nt, Artificial Sequence
  Guide RNA
ucaagaggccuuacacacucc

SEQ ID NO: 33580 - RNA, 21 nt, Artificial Sequence
  Guide RNA
uccacucucaaaacccugccc

SEQ ID NO: 33581 - RNA, 21 nt, Artificial Sequence
  Guide RNA
uccgcucucaaaacccugccc

SEQ ID NO: 33582 - RNA, 21 nt, Artificial Sequence
  Guide RNA
ugagagcggaguguguaaggc

SEQ ID NO: 33583 - RNA, 21 nt, Artificial Sequence
  Guide RNA
ugagaguggaguguguaaggc

SEQ ID NO: 33584 - RNA, 21 nt, Artificial Sequence
  Guide RNA
ugggcaggguuuugagagcgg

SEQ ID NO: 33585 - RNA, 21 nt, Artificial Sequence
  Guide RNA
ugggcaggguuuugagagugg

SEQ ID NO: 33586 - RNA, 21 nt, Artificial Sequence
  Guide RNA
uuacacacuccacucucaaaa

SEQ ID NO: 33587 - RNA, 21 nt, Artificial Sequence
  Guide RNA
uuacacacuccgcucucaaaa

SEQ ID NO: 33588 - RNA, 21 nt, Artificial Sequence
  Guide RNA
uugagagcggaguguguaagg

SEQ ID NO: 33589 - RNA, 21 nt, Artificial Sequence
  Guide RNA
uugagaguggaguguguaagg

SEQ ID NO: 33590 - RNA, 21 nt, Artificial Sequence
  Guide RNA
uuugagagcggaguguguaag

SEQ ID NO: 33591 - RNA, 21 nt, Artificial Sequence
  Guide RNA
uuugagaguggaguguguaag

SEQ ID NO: 33592 - RNA, 21 nt, Artificial Sequence
  Guide RNA
uuuugagagcggaguguguaa

SEQ ID NO: 33593 - RNA, 21 nt, Artificial Sequence
  Guide RNA
uuuugagaguggaguguguaa

SEQ ID NO: 33594 - RNA, 22 nt, Artificial Sequence
  Guide RNA
aagaggccuuacacacuccacu

SEQ ID NO: 33595 - RNA, 22 nt, Artificial Sequence
  Guide RNA
aagaggccuuacacacuccgcu

SEQ ID NO: 33596 - RNA, 22 nt, Artificial Sequence
  Guide RNA
acacacuccacucucaaaaccc

SEQ ID NO: 33597 - RNA, 22 nt, Artificial Sequence
  Guide RNA
acacacuccgcucucaaaaccc

SEQ ID NO: 33598 - RNA, 22 nt, Artificial Sequence
  Guide RNA
acacuccacucucaaaacccug

SEQ ID NO: 33599 - RNA, 22 nt, Artificial Sequence
  Guide RNA
acacuccgcucucaaaacccug

SEQ ID NO: 33600 - RNA, 22 nt, Artificial Sequence
  Guide RNA
acuccacucucaaaacccugcc

SEQ ID NO: 33601 - RNA, 22 nt, Artificial Sequence
  Guide RNA
acuccgcucucaaaacccugcc

SEQ ID NO: 33602 - RNA, 22 nt, Artificial Sequence
  Guide RNA
agagcggaguguguaaggccuc

SEQ ID NO: 33603 - RNA, 22 nt, Artificial Sequence
  Guide RNA
agaggccuuacacacuccacuc

SEQ ID NO: 33604 - RNA, 22 nt, Artificial Sequence
  Guide RNA
agaggccuuacacacuccgcuc

SEQ ID NO: 33605 - RNA, 22 nt, Artificial Sequence
  Guide RNA
agaguggaguguguaaggccuc

SEQ ID NO: 33606 - RNA, 22 nt, Artificial Sequence
  Guide RNA
agcggaguguguaaggccucuu

SEQ ID NO: 33607 - RNA, 22 nt, Artificial Sequence
  Guide RNA
aggccuuacacacuccacucuc

SEQ ID NO: 33608 - RNA, 22 nt, Artificial Sequence
  Guide RNA
aggccuuacacacuccgcucuc

SEQ ID NO: 33609 - RNA, 22 nt, Artificial Sequence
  Guide RNA
aggcugggcaggguuuugagag

SEQ ID NO: 33610 - RNA, 22 nt, Artificial Sequence
  Guide RNA
aggguuuugagagcggagugug

SEQ ID NO: 33611 - RNA, 22 nt, Artificial Sequence
  Guide RNA
aggguuuugagaguggagugug

SEQ ID NO: 33612 - RNA, 22 nt, Artificial Sequence
  Guide RNA
aguggaguguguaaggccucuu

SEQ ID NO: 33613 - RNA, 22 nt, Artificial Sequence
  Guide RNA
caagaggccuuacacacuccac

SEQ ID NO: 33614 - RNA, 22 nt, Artificial Sequence
  Guide RNA
caagaggccuuacacacuccgc

SEQ ID NO: 33615 - RNA, 22 nt, Artificial Sequence
  Guide RNA
cacacuccacucucaaaacccu

SEQ ID NO: 33616 - RNA, 22 nt, Artificial Sequence
  Guide RNA
cacacuccgcucucaaaacccu

SEQ ID NO: 33617 - RNA, 22 nt, Artificial Sequence
  Guide RNA
cacuccacucucaaaacccugc

SEQ ID NO: 33618 - RNA, 22 nt, Artificial Sequence
  Guide RNA
cacuccgcucucaaaacccugc

SEQ ID NO: 33619 - RNA, 22 nt, Artificial Sequence
  Guide RNA
cacucucaaaacccugcccagc

SEQ ID NO: 33620 - RNA, 22 nt, Artificial Sequence
  Guide RNA
caggguuuugagagcggagugu

SEQ ID NO: 33621 - RNA, 22 nt, Artificial Sequence
  Guide RNA
caggguuuugagaguggagugu

SEQ ID NO: 33622 - RNA, 22 nt, Artificial Sequence
  Guide RNA
ccacucucaaaacccugcccag

SEQ ID NO: 33623 - RNA, 22 nt, Artificial Sequence
  Guide RNA
ccgcucucaaaacccugcccag

SEQ ID NO: 33624 - RNA, 22 nt, Artificial Sequence
  Guide RNA
ccucaagaggccuuacacacuc

SEQ ID NO: 33625 - RNA, 22 nt, Artificial Sequence
  Guide RNA
ccuuacacacuccacucucaaa

SEQ ID NO: 33626 - RNA, 22 nt, Artificial Sequence
  Guide RNA
ccuuacacacuccgcucucaaa

SEQ ID NO: 33627 - RNA, 22 nt, Artificial Sequence
  Guide RNA
cgcucucaaaacccugcccagc

SEQ ID NO: 33628 - RNA, 22 nt, Artificial Sequence
  Guide RNA
cucaagaggccuuacacacucc

SEQ ID NO: 33629 - RNA, 22 nt, Artificial Sequence
  Guide RNA
cuccacucucaaaacccugccc

SEQ ID NO: 33630 - RNA, 22 nt, Artificial Sequence
  Guide RNA
cuccgcucucaaaacccugccc

SEQ ID NO: 33631 - RNA, 22 nt, Artificial Sequence
  Guide RNA
cugggcaggguuuugagagcgg

SEQ ID NO: 33632 - RNA, 22 nt, Artificial Sequence
  Guide RNA
cugggcaggguuuugagagugg

SEQ ID NO: 33633 - RNA, 22 nt, Artificial Sequence
  Guide RNA
cuuacacacuccacucucaaaa

SEQ ID NO: 33634 - RNA, 22 nt, Artificial Sequence
  Guide RNA
cuuacacacuccgcucucaaaa

SEQ ID NO: 33635 - RNA, 22 nt, Artificial Sequence
  Guide RNA
gagagcggaguguguaaggccu

SEQ ID NO: 33636 - RNA, 22 nt, Artificial Sequence
  Guide RNA
gagaguggaguguguaaggccu

SEQ ID NO: 33637 - RNA, 22 nt, Artificial Sequence
  Guide RNA
gagcggaguguguaaggccucu

SEQ ID NO: 33638 - RNA, 22 nt, Artificial Sequence
  Guide RNA
gaggccuuacacacuccacucu

SEQ ID NO: 33639 - RNA, 22 nt, Artificial Sequence
  Guide RNA
gaggccuuacacacuccgcucu

SEQ ID NO: 33640 - RNA, 22 nt, Artificial Sequence
  Guide RNA
gaggcugggcaggguuuugaga

SEQ ID NO: 33641 - RNA, 22 nt, Artificial Sequence
  Guide RNA
gaguggaguguguaaggccucu

SEQ ID NO: 33642 - RNA, 22 nt, Artificial Sequence
  Guide RNA
gcaggguuuugagagcggagug

SEQ ID NO: 33643 - RNA, 22 nt, Artificial Sequence
  Guide RNA
gcaggguuuugagaguggagug

SEQ ID NO: 33644 - RNA, 22 nt, Artificial Sequence
  Guide RNA
gccucaagaggccuuacacacu

SEQ ID NO: 33645 - RNA, 22 nt, Artificial Sequence
  Guide RNA
gccuuacacacuccacucucaa

SEQ ID NO: 33646 - RNA, 22 nt, Artificial Sequence
  Guide RNA
gccuuacacacuccgcucucaa

SEQ ID NO: 33647 - RNA, 22 nt, Artificial Sequence
  Guide RNA
gcggaguguguaaggccucuug

SEQ ID NO: 33648 - RNA, 22 nt, Artificial Sequence
  Guide RNA
gcugggcaggguuuugagagcg

SEQ ID NO: 33649 - RNA, 22 nt, Artificial Sequence
  Guide RNA
gcugggcaggguuuugagagug

SEQ ID NO: 33650 - RNA, 22 nt, Artificial Sequence
  Guide RNA
ggaggcugggcaggguuuugag

SEQ ID NO: 33651 - RNA, 22 nt, Artificial Sequence
  Guide RNA
ggcaggguuuugagagcggagu

SEQ ID NO: 33652 - RNA, 22 nt, Artificial Sequence
  Guide RNA
ggcaggguuuugagaguggagu

SEQ ID NO: 33653 - RNA, 22 nt, Artificial Sequence
  Guide RNA
ggccucaagaggccuuacacac

SEQ ID NO: 33654 - RNA, 22 nt, Artificial Sequence
  Guide RNA
ggccuuacacacuccacucuca

SEQ ID NO: 33655 - RNA, 22 nt, Artificial Sequence
  Guide RNA
ggccuuacacacuccgcucuca

SEQ ID NO: 33656 - RNA, 22 nt, Artificial Sequence
  Guide RNA
ggcugggcaggguuuugagagc

SEQ ID NO: 33657 - RNA, 22 nt, Artificial Sequence
  Guide RNA
ggcugggcaggguuuugagagu

SEQ ID NO: 33658 - RNA, 22 nt, Artificial Sequence
  Guide RNA
gggcaggguuuugagagcggag

SEQ ID NO: 33659 - RNA, 22 nt, Artificial Sequence
  Guide RNA
gggcaggguuuugagaguggag

SEQ ID NO: 33660 - RNA, 22 nt, Artificial Sequence
  Guide RNA
ggguuuugagagcggagugugu

SEQ ID NO: 33661 - RNA, 22 nt, Artificial Sequence
  Guide RNA
ggguuuugagaguggagugugu

SEQ ID NO: 33662 - RNA, 22 nt, Artificial Sequence
  Guide RNA
gguuuugagagcggagugugua

SEQ ID NO: 33663 - RNA, 22 nt, Artificial Sequence
  Guide RNA
gguuuugagaguggagugugua

SEQ ID NO: 33664 - RNA, 22 nt, Artificial Sequence
  Guide RNA
guggaguguguaaggccucuug

SEQ ID NO: 33665 - RNA, 22 nt, Artificial Sequence
  Guide RNA
guuuugagagcggaguguguaa

SEQ ID NO: 33666 - RNA, 22 nt, Artificial Sequence
  Guide RNA
guuuugagaguggaguguguaa

SEQ ID NO: 33667 - RNA, 22 nt, Artificial Sequence
  Guide RNA
uacacacuccacucucaaaacc

SEQ ID NO: 33668 - RNA, 22 nt, Artificial Sequence
  Guide RNA
uacacacuccgcucucaaaacc

SEQ ID NO: 33669 - RNA, 22 nt, Artificial Sequence
  Guide RNA
ucaagaggccuuacacacucca

SEQ ID NO: 33670 - RNA, 22 nt, Artificial Sequence
  Guide RNA
ucaagaggccuuacacacuccg

SEQ ID NO: 33671 - RNA, 22 nt, Artificial Sequence
  Guide RNA
uccacucucaaaacccugccca

SEQ ID NO: 33672 - RNA, 22 nt, Artificial Sequence
  Guide RNA
uccgcucucaaaacccugccca

SEQ ID NO: 33673 - RNA, 22 nt, Artificial Sequence
  Guide RNA
ugagagcggaguguguaaggcc

SEQ ID NO: 33674 - RNA, 22 nt, Artificial Sequence
  Guide RNA
ugagaguggaguguguaaggcc

SEQ ID NO: 33675 - RNA, 22 nt, Artificial Sequence
  Guide RNA
uggaggcugggcaggguuuuga

SEQ ID NO: 33676 - RNA, 22 nt, Artificial Sequence
  Guide RNA
ugggcaggguuuugagagcgga

SEQ ID NO: 33677 - RNA, 22 nt, Artificial Sequence
  Guide RNA
ugggcaggguuuugagagugga

SEQ ID NO: 33678 - RNA, 22 nt, Artificial Sequence
  Guide RNA
uuacacacuccacucucaaaac

SEQ ID NO: 33679 - RNA, 22 nt, Artificial Sequence
  Guide RNA
uuacacacuccgcucucaaaac

SEQ ID NO: 33680 - RNA, 22 nt, Artificial Sequence
  Guide RNA
uugagagcggaguguguaaggc

SEQ ID NO: 33681 - RNA, 22 nt, Artificial Sequence
  Guide RNA
uugagaguggaguguguaaggc

SEQ ID NO: 33682 - RNA, 22 nt, Artificial Sequence
  Guide RNA
uuugagagcggaguguguaagg

SEQ ID NO: 33683 - RNA, 22 nt, Artificial Sequence
  Guide RNA
uuugagaguggaguguguaagg

SEQ ID NO: 33684 - RNA, 22 nt, Artificial Sequence
  Guide RNA
uuuugagagcggaguguguaag

SEQ ID NO: 33685 - RNA, 22 nt, Artificial Sequence
  Guide RNA
uuuugagaguggaguguguaag

SEQ ID NO: 33686 - RNA, 20 nt, Artificial Sequence
  Guide RNA
aaacagacagaacaugggcc

SEQ ID NO: 33687 - RNA, 20 nt, Artificial Sequence
  Guide RNA
aaacagagagaacaugggcc

SEQ ID NO: 33688 - RNA, 20 nt, Artificial Sequence
  Guide RNA
aacagacagaacaugggcca

SEQ ID NO: 33689 - RNA, 20 nt, Artificial Sequence
  Guide RNA
aacagagagaacaugggcca

SEQ ID NO: 33690 - RNA, 20 nt, Artificial Sequence
  Guide RNA
acagaacaugggccaucaaa

SEQ ID NO: 33691 - RNA, 20 nt, Artificial Sequence
  Guide RNA
acagacagaacaugggccau

SEQ ID NO: 33692 - RNA, 20 nt, Artificial Sequence
  Guide RNA
acagagagaacaugggccau

SEQ ID NO: 33693 - RNA, 20 nt, Artificial Sequence
  Guide RNA
agacagaacaugggccauca

SEQ ID NO: 33694 - RNA, 20 nt, Artificial Sequence
  Guide RNA
agagaacaugggccaucaaa

SEQ ID NO: 33695 - RNA, 20 nt, Artificial Sequence
  Guide RNA
agagagaacaugggccauca

SEQ ID NO: 33696 - RNA, 20 nt, Artificial Sequence
  Guide RNA
aggauguggcaggggaaaca

SEQ ID NO: 33697 - RNA, 20 nt, Artificial Sequence
  Guide RNA
aggggaaacagacagaacau

SEQ ID NO: 33698 - RNA, 20 nt, Artificial Sequence
  Guide RNA
aggggaaacagagagaacau

SEQ ID NO: 33699 - RNA, 20 nt, Artificial Sequence
  Guide RNA
auggcccauguucucucugu

SEQ ID NO: 33700 - RNA, 20 nt, Artificial Sequence
  Guide RNA
auggcccauguucugucugu

SEQ ID NO: 33701 - RNA, 20 nt, Artificial Sequence
  Guide RNA
auguggcaggggaaacagac

SEQ ID NO: 33702 - RNA, 20 nt, Artificial Sequence
  Guide RNA
auguggcaggggaaacagag

SEQ ID NO: 33703 - RNA, 20 nt, Artificial Sequence
  Guide RNA
auguucucucuguuuccccu

SEQ ID NO: 33704 - RNA, 20 nt, Artificial Sequence
  Guide RNA
auguucugucuguuuccccu

SEQ ID NO: 33705 - RNA, 20 nt, Artificial Sequence
  Guide RNA
cagacagaacaugggccauc

SEQ ID NO: 33706 - RNA, 20 nt, Artificial Sequence
  Guide RNA
cagagagaacaugggccauc

SEQ ID NO: 33707 - RNA, 20 nt, Artificial Sequence
  Guide RNA
caggggaaacagacagaaca

SEQ ID NO: 33708 - RNA, 20 nt, Artificial Sequence
  Guide RNA
caggggaaacagagagaaca

SEQ ID NO: 33709 - RNA, 20 nt, Artificial Sequence
  Guide RNA
cauguucucucuguuucccc

SEQ ID NO: 33710 - RNA, 20 nt, Artificial Sequence
  Guide RNA
cauguucugucuguuucccc

SEQ ID NO: 33711 - RNA, 20 nt, Artificial Sequence
  Guide RNA
ccauguucucucuguuuccc

SEQ ID NO: 33712 - RNA, 20 nt, Artificial Sequence
  Guide RNA
ccauguucugucuguuuccc

SEQ ID NO: 33713 - RNA, 20 nt, Artificial Sequence
  Guide RNA
cccauguucucucuguuucc

SEQ ID NO: 33714 - RNA, 20 nt, Artificial Sequence
  Guide RNA
cccauguucugucuguuucc

SEQ ID NO: 33715 - RNA, 20 nt, Artificial Sequence
  Guide RNA
cucucuguuuccccugccac

SEQ ID NO: 33716 - RNA, 20 nt, Artificial Sequence
  Guide RNA
cugucuguuuccccugccac

SEQ ID NO: 33717 - RNA, 20 nt, Artificial Sequence
  Guide RNA
cuuugauggcccauguucuc

SEQ ID NO: 33718 - RNA, 20 nt, Artificial Sequence
  Guide RNA
cuuugauggcccauguucug

SEQ ID NO: 33719 - RNA, 20 nt, Artificial Sequence
  Guide RNA
gaaacagacagaacaugggc

SEQ ID NO: 33720 - RNA, 20 nt, Artificial Sequence
  Guide RNA
gaaacagagagaacaugggc

SEQ ID NO: 33721 - RNA, 20 nt, Artificial Sequence
  Guide RNA
gacagaacaugggccaucaa

SEQ ID NO: 33722 - RNA, 20 nt, Artificial Sequence
  Guide RNA
gagagaacaugggccaucaa

SEQ ID NO: 33723 - RNA, 20 nt, Artificial Sequence
  Guide RNA
gaggauguggcaggggaaac

SEQ ID NO: 33724 - RNA, 20 nt, Artificial Sequence
  Guide RNA
gauggcccauguucucucug

SEQ ID NO: 33725 - RNA, 20 nt, Artificial Sequence
  Guide RNA
gauggcccauguucugucug

SEQ ID NO: 33726 - RNA, 20 nt, Artificial Sequence
  Guide RNA
gauguggcaggggaaacaga

SEQ ID NO: 33727 - RNA, 20 nt, Artificial Sequence
  Guide RNA
gcaggggaaacagacagaac

SEQ ID NO: 33728 - RNA, 20 nt, Artificial Sequence
  Guide RNA
gcaggggaaacagagagaac

SEQ ID NO: 33729 - RNA, 20 nt, Artificial Sequence
  Guide RNA
gcccauguucucucuguuuc

SEQ ID NO: 33730 - RNA, 20 nt, Artificial Sequence
  Guide RNA
gcccauguucugucuguuuc

SEQ ID NO: 33731 - RNA, 20 nt, Artificial Sequence
  Guide RNA
ggaaacagacagaacauggg

SEQ ID NO: 33732 - RNA, 20 nt, Artificial Sequence
  Guide RNA
ggaaacagagagaacauggg

SEQ ID NO: 33733 - RNA, 20 nt, Artificial Sequence
  Guide RNA
ggauguggcaggggaaacag

SEQ ID NO: 33734 - RNA, 20 nt, Artificial Sequence
  Guide RNA
ggcaggggaaacagacagaa

SEQ ID NO: 33735 - RNA, 20 nt, Artificial Sequence
  Guide RNA
ggcaggggaaacagagagaa

SEQ ID NO: 33736 - RNA, 20 nt, Artificial Sequence
  Guide RNA
ggcccauguucucucuguuu

SEQ ID NO: 33737 - RNA, 20 nt, Artificial Sequence
  Guide RNA
ggcccauguucugucuguuu

SEQ ID NO: 33738 - RNA, 20 nt, Artificial Sequence
  Guide RNA
gggaaacagacagaacaugg

SEQ ID NO: 33739 - RNA, 20 nt, Artificial Sequence
  Guide RNA
gggaaacagagagaacaugg

SEQ ID NO: 33740 - RNA, 20 nt, Artificial Sequence
  Guide RNA
ggggaaacagacagaacaug

SEQ ID NO: 33741 - RNA, 20 nt, Artificial Sequence
  Guide RNA
ggggaaacagagagaacaug

SEQ ID NO: 33742 - RNA, 20 nt, Artificial Sequence
  Guide RNA
guggcaggggaaacagacag

SEQ ID NO: 33743 - RNA, 20 nt, Artificial Sequence
  Guide RNA
guggcaggggaaacagagag

SEQ ID NO: 33744 - RNA, 20 nt, Artificial Sequence
  Guide RNA
guucucucuguuuccccugc

SEQ ID NO: 33745 - RNA, 20 nt, Artificial Sequence
  Guide RNA
guucugucuguuuccccugc

SEQ ID NO: 33746 - RNA, 20 nt, Artificial Sequence
  Guide RNA
guuucuuugauggcccaugu

SEQ ID NO: 33747 - RNA, 20 nt, Artificial Sequence
  Guide RNA
ucucucuguuuccccugcca

SEQ ID NO: 33748 - RNA, 20 nt, Artificial Sequence
  Guide RNA
ucucuguuuccccugccaca

SEQ ID NO: 33749 - RNA, 20 nt, Artificial Sequence
  Guide RNA
ucugucuguuuccccugcca

SEQ ID NO: 33750 - RNA, 20 nt, Artificial Sequence
  Guide RNA
ucuuugauggcccauguucu

SEQ ID NO: 33751 - RNA, 20 nt, Artificial Sequence
  Guide RNA
ugauggcccauguucucucu

SEQ ID NO: 33752 - RNA, 20 nt, Artificial Sequence
  Guide RNA
ugauggcccauguucugucu

SEQ ID NO: 33753 - RNA, 20 nt, Artificial Sequence
  Guide RNA
uggcaggggaaacagacaga

SEQ ID NO: 33754 - RNA, 20 nt, Artificial Sequence
  Guide RNA
uggcaggggaaacagagaga

SEQ ID NO: 33755 - RNA, 20 nt, Artificial Sequence
  Guide RNA
uggcccauguucucucuguu

SEQ ID NO: 33756 - RNA, 20 nt, Artificial Sequence
  Guide RNA
uggcccauguucugucuguu

SEQ ID NO: 33757 - RNA, 20 nt, Artificial Sequence
  Guide RNA
ugucuguuuccccugccaca

SEQ ID NO: 33758 - RNA, 20 nt, Artificial Sequence
  Guide RNA
uguggcaggggaaacagaca

SEQ ID NO: 33759 - RNA, 20 nt, Artificial Sequence
  Guide RNA
uguggcaggggaaacagaga

SEQ ID NO: 33760 - RNA, 20 nt, Artificial Sequence
  Guide RNA
uguucucucuguuuccccug

SEQ ID NO: 33761 - RNA, 20 nt, Artificial Sequence
  Guide RNA
uguucugucuguuuccccug

SEQ ID NO: 33762 - RNA, 20 nt, Artificial Sequence
  Guide RNA
uucucucuguuuccccugcc

SEQ ID NO: 33763 - RNA, 20 nt, Artificial Sequence
  Guide RNA
uucugucuguuuccccugcc

SEQ ID NO: 33764 - RNA, 20 nt, Artificial Sequence
  Guide RNA
uucuuugauggcccauguuc

SEQ ID NO: 33765 - RNA, 20 nt, Artificial Sequence
  Guide RNA
uugauggcccauguucucuc

SEQ ID NO: 33766 - RNA, 20 nt, Artificial Sequence
  Guide RNA
uugauggcccauguucuguc

SEQ ID NO: 33767 - RNA, 20 nt, Artificial Sequence
  Guide RNA
uuucuuugauggcccauguu

SEQ ID NO: 33768 - RNA, 20 nt, Artificial Sequence
  Guide RNA
uuugauggcccauguucucu

SEQ ID NO: 33769 - RNA, 20 nt, Artificial Sequence
  Guide RNA
uuugauggcccauguucugu

SEQ ID NO: 33770 - RNA, 21 nt, Artificial Sequence
  Guide RNA
aaacagacagaacaugggcca

SEQ ID NO: 33771 - RNA, 21 nt, Artificial Sequence
  Guide RNA
aaacagagagaacaugggcca

SEQ ID NO: 33772 - RNA, 21 nt, Artificial Sequence
  Guide RNA
aacagacagaacaugggccau

SEQ ID NO: 33773 - RNA, 21 nt, Artificial Sequence
  Guide RNA
aacagagagaacaugggccau

SEQ ID NO: 33774 - RNA, 21 nt, Artificial Sequence
  Guide RNA
acagaacaugggccaucaaag

SEQ ID NO: 33775 - RNA, 21 nt, Artificial Sequence
  Guide RNA
acagacagaacaugggccauc

SEQ ID NO: 33776 - RNA, 21 nt, Artificial Sequence
  Guide RNA
acagagagaacaugggccauc

SEQ ID NO: 33777 - RNA, 21 nt, Artificial Sequence
  Guide RNA
agacagaacaugggccaucaa

SEQ ID NO: 33778 - RNA, 21 nt, Artificial Sequence
  Guide RNA
agagaacaugggccaucaaag

SEQ ID NO: 33779 - RNA, 21 nt, Artificial Sequence
  Guide RNA
agagagaacaugggccaucaa

SEQ ID NO: 33780 - RNA, 21 nt, Artificial Sequence
  Guide RNA
agaggauguggcaggggaaac

SEQ ID NO: 33781 - RNA, 21 nt, Artificial Sequence
  Guide RNA
aggauguggcaggggaaacag

SEQ ID NO: 33782 - RNA, 21 nt, Artificial Sequence
  Guide RNA
aggggaaacagacagaacaug

SEQ ID NO: 33783 - RNA, 21 nt, Artificial Sequence
  Guide RNA
aggggaaacagagagaacaug

SEQ ID NO: 33784 - RNA, 21 nt, Artificial Sequence
  Guide RNA
aguuucuuugauggcccaugu

SEQ ID NO: 33785 - RNA, 21 nt, Artificial Sequence
  Guide RNA
auggcccauguucucucuguu

SEQ ID NO: 33786 - RNA, 21 nt, Artificial Sequence
  Guide RNA
auggcccauguucugucuguu

SEQ ID NO: 33787 - RNA, 21 nt, Artificial Sequence
  Guide RNA
auguggcaggggaaacagaca

SEQ ID NO: 33788 - RNA, 21 nt, Artificial Sequence
  Guide RNA
auguggcaggggaaacagaga

SEQ ID NO: 33789 - RNA, 21 nt, Artificial Sequence
  Guide RNA
auguucucucuguuuccccug

SEQ ID NO: 33790 - RNA, 21 nt, Artificial Sequence
  Guide RNA
auguucugucuguuuccccug

SEQ ID NO: 33791 - RNA, 21 nt, Artificial Sequence
  Guide RNA
cagacagaacaugggccauca

SEQ ID NO: 33792 - RNA, 21 nt, Artificial Sequence
  Guide RNA
cagagagaacaugggccauca

SEQ ID NO: 33793 - RNA, 21 nt, Artificial Sequence
  Guide RNA
caggggaaacagacagaacau

SEQ ID NO: 33794 - RNA, 21 nt, Artificial Sequence
  Guide RNA
caggggaaacagagagaacau

SEQ ID NO: 33795 - RNA, 21 nt, Artificial Sequence
  Guide RNA
cauguucucucuguuuccccu

SEQ ID NO: 33796 - RNA, 21 nt, Artificial Sequence
  Guide RNA
cauguucugucuguuuccccu

SEQ ID NO: 33797 - RNA, 21 nt, Artificial Sequence
  Guide RNA
ccauguucucucuguuucccc

SEQ ID NO: 33798 - RNA, 21 nt, Artificial Sequence
  Guide RNA
ccauguucugucuguuucccc

SEQ ID NO: 33799 - RNA, 21 nt, Artificial Sequence
  Guide RNA
cccauguucucucuguuuccc

SEQ ID NO: 33800 - RNA, 21 nt, Artificial Sequence
  Guide RNA
cccauguucugucuguuuccc

SEQ ID NO: 33801 - RNA, 21 nt, Artificial Sequence
  Guide RNA
cucucuguuuccccugccaca

SEQ ID NO: 33802 - RNA, 21 nt, Artificial Sequence
  Guide RNA
cugucuguuuccccugccaca

SEQ ID NO: 33803 - RNA, 21 nt, Artificial Sequence
  Guide RNA
cuuugauggcccauguucucu

SEQ ID NO: 33804 - RNA, 21 nt, Artificial Sequence
  Guide RNA
cuuugauggcccauguucugu

SEQ ID NO: 33805 - RNA, 21 nt, Artificial Sequence
  Guide RNA
gaaacagacagaacaugggcc

SEQ ID NO: 33806 - RNA, 21 nt, Artificial Sequence
  Guide RNA
gaaacagagagaacaugggcc

SEQ ID NO: 33807 - RNA, 21 nt, Artificial Sequence
  Guide RNA
gacagaacaugggccaucaaa

SEQ ID NO: 33808 - RNA, 21 nt, Artificial Sequence
  Guide RNA
gagagaacaugggccaucaaa

SEQ ID NO: 33809 - RNA, 21 nt, Artificial Sequence
  Guide RNA
gaggauguggcaggggaaaca

SEQ ID NO: 33810 - RNA, 21 nt, Artificial Sequence
  Guide RNA
gauggcccauguucucucugu

SEQ ID NO: 33811 - RNA, 21 nt, Artificial Sequence
  Guide RNA
gauggcccauguucugucugu

SEQ ID NO: 33812 - RNA, 21 nt, Artificial Sequence
  Guide RNA
gauguggcaggggaaacagac

SEQ ID NO: 33813 - RNA, 21 nt, Artificial Sequence
  Guide RNA
gauguggcaggggaaacagag

SEQ ID NO: 33814 - RNA, 21 nt, Artificial Sequence
  Guide RNA
gcaggggaaacagacagaaca

SEQ ID NO: 33815 - RNA, 21 nt, Artificial Sequence
  Guide RNA
gcaggggaaacagagagaaca

SEQ ID NO: 33816 - RNA, 21 nt, Artificial Sequence
  Guide RNA
gcccauguucucucuguuucc

SEQ ID NO: 33817 - RNA, 21 nt, Artificial Sequence
  Guide RNA
gcccauguucugucuguuucc

SEQ ID NO: 33818 - RNA, 21 nt, Artificial Sequence
  Guide RNA
ggaaacagacagaacaugggc

SEQ ID NO: 33819 - RNA, 21 nt, Artificial Sequence
  Guide RNA
ggaaacagagagaacaugggc

SEQ ID NO: 33820 - RNA, 21 nt, Artificial Sequence
  Guide RNA
ggauguggcaggggaaacaga

SEQ ID NO: 33821 - RNA, 21 nt, Artificial Sequence
  Guide RNA
ggcaggggaaacagacagaac

SEQ ID NO: 33822 - RNA, 21 nt, Artificial Sequence
  Guide RNA
ggcaggggaaacagagagaac

SEQ ID NO: 33823 - RNA, 21 nt, Artificial Sequence
  Guide RNA
ggcccauguucucucuguuuc

SEQ ID NO: 33824 - RNA, 21 nt, Artificial Sequence
  Guide RNA
ggcccauguucugucuguuuc

SEQ ID NO: 33825 - RNA, 21 nt, Artificial Sequence
  Guide RNA
gggaaacagacagaacauggg

SEQ ID NO: 33826 - RNA, 21 nt, Artificial Sequence
  Guide RNA
gggaaacagagagaacauggg

SEQ ID NO: 33827 - RNA, 21 nt, Artificial Sequence
  Guide RNA
ggggaaacagacagaacaugg

SEQ ID NO: 33828 - RNA, 21 nt, Artificial Sequence
  Guide RNA
ggggaaacagagagaacaugg

SEQ ID NO: 33829 - RNA, 21 nt, Artificial Sequence
  Guide RNA
guggcaggggaaacagacaga

SEQ ID NO: 33830 - RNA, 21 nt, Artificial Sequence
  Guide RNA
guggcaggggaaacagagaga

SEQ ID NO: 33831 - RNA, 21 nt, Artificial Sequence
  Guide RNA
guucucucuguuuccccugcc

SEQ ID NO: 33832 - RNA, 21 nt, Artificial Sequence
  Guide RNA
guucugucuguuuccccugcc

SEQ ID NO: 33833 - RNA, 21 nt, Artificial Sequence
  Guide RNA
guuucuuugauggcccauguu

SEQ ID NO: 33834 - RNA, 21 nt, Artificial Sequence
  Guide RNA
ucucucuguuuccccugccac

SEQ ID NO: 33835 - RNA, 21 nt, Artificial Sequence
  Guide RNA
ucucuguuuccccugccacau

SEQ ID NO: 33836 - RNA, 21 nt, Artificial Sequence
  Guide RNA
ucugucuguuuccccugccac

SEQ ID NO: 33837 - RNA, 21 nt, Artificial Sequence
  Guide RNA
ucuuugauggcccauguucuc

SEQ ID NO: 33838 - RNA, 21 nt, Artificial Sequence
  Guide RNA
ucuuugauggcccauguucug

SEQ ID NO: 33839 - RNA, 21 nt, Artificial Sequence
  Guide RNA
ugauggcccauguucucucug

SEQ ID NO: 33840 - RNA, 21 nt, Artificial Sequence
  Guide RNA
ugauggcccauguucugucug

SEQ ID NO: 33841 - RNA, 21 nt, Artificial Sequence
  Guide RNA
uggcaggggaaacagacagaa

SEQ ID NO: 33842 - RNA, 21 nt, Artificial Sequence
  Guide RNA
uggcaggggaaacagagagaa

SEQ ID NO: 33843 - RNA, 21 nt, Artificial Sequence
  Guide RNA
uggcccauguucucucuguuu

SEQ ID NO: 33844 - RNA, 21 nt, Artificial Sequence
  Guide RNA
uggcccauguucugucuguuu

SEQ ID NO: 33845 - RNA, 21 nt, Artificial Sequence
  Guide RNA
ugucuguuuccccugccacau

SEQ ID NO: 33846 - RNA, 21 nt, Artificial Sequence
  Guide RNA
uguggcaggggaaacagacag

SEQ ID NO: 33847 - RNA, 21 nt, Artificial Sequence
  Guide RNA
uguggcaggggaaacagagag

SEQ ID NO: 33848 - RNA, 21 nt, Artificial Sequence
  Guide RNA
uguucucucuguuuccccugc

SEQ ID NO: 33849 - RNA, 21 nt, Artificial Sequence
  Guide RNA
uguucugucuguuuccccugc

SEQ ID NO: 33850 - RNA, 21 nt, Artificial Sequence
  Guide RNA
uucucucuguuuccccugcca

SEQ ID NO: 33851 - RNA, 21 nt, Artificial Sequence
  Guide RNA
uucugucuguuuccccugcca

SEQ ID NO: 33852 - RNA, 21 nt, Artificial Sequence
  Guide RNA
uucuuugauggcccauguucu

SEQ ID NO: 33853 - RNA, 21 nt, Artificial Sequence
  Guide RNA
uugauggcccauguucucucu

SEQ ID NO: 33854 - RNA, 21 nt, Artificial Sequence
  Guide RNA
uugauggcccauguucugucu

SEQ ID NO: 33855 - RNA, 21 nt, Artificial Sequence
  Guide RNA
uuucuuugauggcccauguuc

SEQ ID NO: 33856 - RNA, 21 nt, Artificial Sequence
  Guide RNA
uuugauggcccauguucucuc

SEQ ID NO: 33857 - RNA, 21 nt, Artificial Sequence
  Guide RNA
uuugauggcccauguucuguc

SEQ ID NO: 33858 - RNA, 22 nt, Artificial Sequence
  Guide RNA
aaacagacagaacaugggccau

SEQ ID NO: 33859 - RNA, 22 nt, Artificial Sequence
  Guide RNA
aaacagagagaacaugggccau

SEQ ID NO: 33860 - RNA, 22 nt, Artificial Sequence
  Guide RNA
aacagacagaacaugggccauc

SEQ ID NO: 33861 - RNA, 22 nt, Artificial Sequence
  Guide RNA
aacagagagaacaugggccauc

SEQ ID NO: 33862 - RNA, 22 nt, Artificial Sequence
  Guide RNA
acagaacaugggccaucaaaga

SEQ ID NO: 33863 - RNA, 22 nt, Artificial Sequence
  Guide RNA
acagacagaacaugggccauca

SEQ ID NO: 33864 - RNA, 22 nt, Artificial Sequence
  Guide RNA
acagagagaacaugggccauca

SEQ ID NO: 33865 - RNA, 22 nt, Artificial Sequence
  Guide RNA
agacagaacaugggccaucaaa

SEQ ID NO: 33866 - RNA, 22 nt, Artificial Sequence
  Guide RNA
agagaacaugggccaucaaaga

SEQ ID NO: 33867 - RNA, 22 nt, Artificial Sequence
  Guide RNA
agagagaacaugggccaucaaa

SEQ ID NO: 33868 - RNA, 22 nt, Artificial Sequence
  Guide RNA
agaggauguggcaggggaaaca

SEQ ID NO: 33869 - RNA, 22 nt, Artificial Sequence
  Guide RNA
aggauguggcaggggaaacaga

SEQ ID NO: 33870 - RNA, 22 nt, Artificial Sequence
  Guide RNA
aggggaaacagacagaacaugg

SEQ ID NO: 33871 - RNA, 22 nt, Artificial Sequence
  Guide RNA
aggggaaacagagagaacaugg

SEQ ID NO: 33872 - RNA, 22 nt, Artificial Sequence
  Guide RNA
aguuucuuugauggcccauguu

SEQ ID NO: 33873 - RNA, 22 nt, Artificial Sequence
  Guide RNA
auggcccauguucucucuguuu

SEQ ID NO: 33874 - RNA, 22 nt, Artificial Sequence
  Guide RNA
auggcccauguucugucuguuu

SEQ ID NO: 33875 - RNA, 22 nt, Artificial Sequence
  Guide RNA
auguggcaggggaaacagacag

SEQ ID NO: 33876 - RNA, 22 nt, Artificial Sequence
  Guide RNA
auguggcaggggaaacagagag

SEQ ID NO: 33877 - RNA, 22 nt, Artificial Sequence
  Guide RNA
auguucucucuguuuccccugc

SEQ ID NO: 33878 - RNA, 22 nt, Artificial Sequence
  Guide RNA
auguucugucuguuuccccugc

SEQ ID NO: 33879 - RNA, 22 nt, Artificial Sequence
  Guide RNA
cagacagaacaugggccaucaa

SEQ ID NO: 33880 - RNA, 22 nt, Artificial Sequence
  Guide RNA
cagagagaacaugggccaucaa

SEQ ID NO: 33881 - RNA, 22 nt, Artificial Sequence
  Guide RNA
caggggaaacagacagaacaug

SEQ ID NO: 33882 - RNA, 22 nt, Artificial Sequence
  Guide RNA
caggggaaacagagagaacaug

SEQ ID NO: 33883 - RNA, 22 nt, Artificial Sequence
  Guide RNA
caguuucuuugauggcccaugu

SEQ ID NO: 33884 - RNA, 22 nt, Artificial Sequence
  Guide RNA
cauguucucucuguuuccccug

SEQ ID NO: 33885 - RNA, 22 nt, Artificial Sequence
  Guide RNA
cauguucugucuguuuccccug

SEQ ID NO: 33886 - RNA, 22 nt, Artificial Sequence
  Guide RNA
ccauguucucucuguuuccccu

SEQ ID NO: 33887 - RNA, 22 nt, Artificial Sequence
  Guide RNA
ccauguucugucuguuuccccu

SEQ ID NO: 33888 - RNA, 22 nt, Artificial Sequence
  Guide RNA
cccauguucucucuguuucccc

SEQ ID NO: 33889 - RNA, 22 nt, Artificial Sequence
  Guide RNA
cccauguucugucuguuucccc

SEQ ID NO: 33890 - RNA, 22 nt, Artificial Sequence
  Guide RNA
cucucuguuuccccugccacau

SEQ ID NO: 33891 - RNA, 22 nt, Artificial Sequence
  Guide RNA
cugucuguuuccccugccacau

SEQ ID NO: 33892 - RNA, 22 nt, Artificial Sequence
  Guide RNA
cuuugauggcccauguucucuc

SEQ ID NO: 33893 - RNA, 22 nt, Artificial Sequence
  Guide RNA
cuuugauggcccauguucuguc

SEQ ID NO: 33894 - RNA, 22 nt, Artificial Sequence
  Guide RNA
gaaacagacagaacaugggcca

SEQ ID NO: 33895 - RNA, 22 nt, Artificial Sequence
  Guide RNA
gaaacagagagaacaugggcca

SEQ ID NO: 33896 - RNA, 22 nt, Artificial Sequence
  Guide RNA
gacagaacaugggccaucaaag

SEQ ID NO: 33897 - RNA, 22 nt, Artificial Sequence
  Guide RNA
gagagaacaugggccaucaaag

SEQ ID NO: 33898 - RNA, 22 nt, Artificial Sequence
  Guide RNA
gagaggauguggcaggggaaac

SEQ ID NO: 33899 - RNA, 22 nt, Artificial Sequence
  Guide RNA
gaggauguggcaggggaaacag

SEQ ID NO: 33900 - RNA, 22 nt, Artificial Sequence
  Guide RNA
gauggcccauguucucucuguu

SEQ ID NO: 33901 - RNA, 22 nt, Artificial Sequence
  Guide RNA
gauggcccauguucugucuguu

SEQ ID NO: 33902 - RNA, 22 nt, Artificial Sequence
  Guide RNA
gauguggcaggggaaacagaca

SEQ ID NO: 33903 - RNA, 22 nt, Artificial Sequence
  Guide RNA
gauguggcaggggaaacagaga

SEQ ID NO: 33904 - RNA, 22 nt, Artificial Sequence
  Guide RNA
gcaggggaaacagacagaacau

SEQ ID NO: 33905 - RNA, 22 nt, Artificial Sequence
  Guide RNA
gcaggggaaacagagagaacau

SEQ ID NO: 33906 - RNA, 22 nt, Artificial Sequence
  Guide RNA
gcccauguucucucuguuuccc

SEQ ID NO: 33907 - RNA, 22 nt, Artificial Sequence
  Guide RNA
gcccauguucugucuguuuccc

SEQ ID NO: 33908 - RNA, 22 nt, Artificial Sequence
  Guide RNA
ggaaacagacagaacaugggcc

SEQ ID NO: 33909 - RNA, 22 nt, Artificial Sequence
  Guide RNA
ggaaacagagagaacaugggcc

SEQ ID NO: 33910 - RNA, 22 nt, Artificial Sequence
  Guide RNA
ggauguggcaggggaaacagac

SEQ ID NO: 33911 - RNA, 22 nt, Artificial Sequence
  Guide RNA
ggauguggcaggggaaacagag

SEQ ID NO: 33912 - RNA, 22 nt, Artificial Sequence
  Guide RNA
ggcaggggaaacagacagaaca

SEQ ID NO: 33913 - RNA, 22 nt, Artificial Sequence
  Guide RNA
ggcaggggaaacagagagaaca

SEQ ID NO: 33914 - RNA, 22 nt, Artificial Sequence
  Guide RNA
ggcccauguucucucuguuucc

SEQ ID NO: 33915 - RNA, 22 nt, Artificial Sequence
  Guide RNA
ggcccauguucugucuguuucc

SEQ ID NO: 33916 - RNA, 22 nt, Artificial Sequence
  Guide RNA
gggaaacagacagaacaugggc

SEQ ID NO: 33917 - RNA, 22 nt, Artificial Sequence
  Guide RNA
gggaaacagagagaacaugggc

SEQ ID NO: 33918 - RNA, 22 nt, Artificial Sequence
  Guide RNA
ggggaaacagacagaacauggg

SEQ ID NO: 33919 - RNA, 22 nt, Artificial Sequence
  Guide RNA
ggggaaacagagagaacauggg

SEQ ID NO: 33920 - RNA, 22 nt, Artificial Sequence
  Guide RNA
guggcaggggaaacagacagaa

SEQ ID NO: 33921 - RNA, 22 nt, Artificial Sequence
  Guide RNA
guggcaggggaaacagagagaa

SEQ ID NO: 33922 - RNA, 22 nt, Artificial Sequence
  Guide RNA
guucucucuguuuccccugcca

SEQ ID NO: 33923 - RNA, 22 nt, Artificial Sequence
  Guide RNA
guucugucuguuuccccugcca

SEQ ID NO: 33924 - RNA, 22 nt, Artificial Sequence
  Guide RNA
guuucuuugauggcccauguuc

SEQ ID NO: 33925 - RNA, 22 nt, Artificial Sequence
  Guide RNA
ucucucuguuuccccugccaca

SEQ ID NO: 33926 - RNA, 22 nt, Artificial Sequence
  Guide RNA
ucucuguuuccccugccacauc

SEQ ID NO: 33927 - RNA, 22 nt, Artificial Sequence
  Guide RNA
ucugucuguuuccccugccaca

SEQ ID NO: 33928 - RNA, 22 nt, Artificial Sequence
  Guide RNA
ucuuugauggcccauguucucu

SEQ ID NO: 33929 - RNA, 22 nt, Artificial Sequence
  Guide RNA
ucuuugauggcccauguucugu

SEQ ID NO: 33930 - RNA, 22 nt, Artificial Sequence
  Guide RNA
ugauggcccauguucucucugu

SEQ ID NO: 33931 - RNA, 22 nt, Artificial Sequence
  Guide RNA
ugauggcccauguucugucugu

SEQ ID NO: 33932 - RNA, 22 nt, Artificial Sequence
  Guide RNA
uggcaggggaaacagacagaac

SEQ ID NO: 33933 - RNA, 22 nt, Artificial Sequence
  Guide RNA
uggcaggggaaacagagagaac

SEQ ID NO: 33934 - RNA, 22 nt, Artificial Sequence
  Guide RNA
uggcccauguucucucuguuuc

SEQ ID NO: 33935 - RNA, 22 nt, Artificial Sequence
  Guide RNA
uggcccauguucugucuguuuc

SEQ ID NO: 33936 - RNA, 22 nt, Artificial Sequence
  Guide RNA
ugucuguuuccccugccacauc

SEQ ID NO: 33937 - RNA, 22 nt, Artificial Sequence
  Guide RNA
uguggcaggggaaacagacaga

SEQ ID NO: 33938 - RNA, 22 nt, Artificial Sequence
  Guide RNA
uguggcaggggaaacagagaga

SEQ ID NO: 33939 - RNA, 22 nt, Artificial Sequence
  Guide RNA
uguucucucuguuuccccugcc

SEQ ID NO: 33940 - RNA, 22 nt, Artificial Sequence
  Guide RNA
uguucugucuguuuccccugcc

SEQ ID NO: 33941 - RNA, 22 nt, Artificial Sequence
  Guide RNA
uucucucuguuuccccugccac

SEQ ID NO: 33942 - RNA, 22 nt, Artificial Sequence
  Guide RNA
uucugucuguuuccccugccac

SEQ ID NO: 33943 - RNA, 22 nt, Artificial Sequence
  Guide RNA
uucuuugauggcccauguucuc

SEQ ID NO: 33944 - RNA, 22 nt, Artificial Sequence
  Guide RNA
uucuuugauggcccauguucug

SEQ ID NO: 33945 - RNA, 22 nt, Artificial Sequence
  Guide RNA
uugauggcccauguucucucug

SEQ ID NO: 33946 - RNA, 22 nt, Artificial Sequence
  Guide RNA
uugauggcccauguucugucug

SEQ ID NO: 33947 - RNA, 22 nt, Artificial Sequence
  Guide RNA
uuucuuugauggcccauguucu

SEQ ID NO: 33948 - RNA, 22 nt, Artificial Sequence
  Guide RNA
uuugauggcccauguucucucu

SEQ ID NO: 33949 - RNA, 22 nt, Artificial Sequence
  Guide RNA
uuugauggcccauguucugucu

SEQ ID NO: 33950 - RNA, 20 nt, Artificial Sequence
  Guide RNA
aaagcaguccgugauauaaa

SEQ ID NO: 33951 - RNA, 20 nt, Artificial Sequence
  Guide RNA
acggacugcucugagaaacu

SEQ ID NO: 33952 - RNA, 20 nt, Artificial Sequence
  Guide RNA
acggacugcuuugagaaacu

SEQ ID NO: 33953 - RNA, 20 nt, Artificial Sequence
  Guide RNA
acugcucugagaaacugaug

SEQ ID NO: 33954 - RNA, 20 nt, Artificial Sequence
  Guide RNA
acugcuuugagaaacugaug

SEQ ID NO: 33955 - RNA, 20 nt, Artificial Sequence
  Guide RNA
agagcaguccgugauauaaa

SEQ ID NO: 33956 - RNA, 20 nt, Artificial Sequence
  Guide RNA
agauauuuauaucacggacu

SEQ ID NO: 33957 - RNA, 20 nt, Artificial Sequence
  Guide RNA
agcuuucaucaguuucucaa

SEQ ID NO: 33958 - RNA, 20 nt, Artificial Sequence
  Guide RNA
agcuuucaucaguuucucag

SEQ ID NO: 33959 - RNA, 20 nt, Artificial Sequence
  Guide RNA
aguuucucaaagcaguccgu

SEQ ID NO: 33960 - RNA, 20 nt, Artificial Sequence
  Guide RNA
aguuucucagagcaguccgu

SEQ ID NO: 33961 - RNA, 20 nt, Artificial Sequence
  Guide RNA
auagcuuucaucaguuucuc

SEQ ID NO: 33962 - RNA, 20 nt, Artificial Sequence
  Guide RNA
auaucacggacugcucugag

SEQ ID NO: 33963 - RNA, 20 nt, Artificial Sequence
  Guide RNA
auaucacggacugcuuugag

SEQ ID NO: 33964 - RNA, 20 nt, Artificial Sequence
  Guide RNA
auauuuauaucacggacugc

SEQ ID NO: 33965 - RNA, 20 nt, Artificial Sequence
  Guide RNA
aucacggacugcucugagaa

SEQ ID NO: 33966 - RNA, 20 nt, Artificial Sequence
  Guide RNA
aucacggacugcuuugagaa

SEQ ID NO: 33967 - RNA, 20 nt, Artificial Sequence
  Guide RNA
aucaguuucucaaagcaguc

SEQ ID NO: 33968 - RNA, 20 nt, Artificial Sequence
  Guide RNA
aucaguuucucagagcaguc

SEQ ID NO: 33969 - RNA, 20 nt, Artificial Sequence
  Guide RNA
auuuauaucacggacugcuc

SEQ ID NO: 33970 - RNA, 20 nt, Artificial Sequence
  Guide RNA
auuuauaucacggacugcuu

SEQ ID NO: 33971 - RNA, 20 nt, Artificial Sequence
  Guide RNA
caaagcaguccgugauauaa

SEQ ID NO: 33972 - RNA, 20 nt, Artificial Sequence
  Guide RNA
cacggacugcucugagaaac

SEQ ID NO: 33973 - RNA, 20 nt, Artificial Sequence
  Guide RNA
cacggacugcuuugagaaac

SEQ ID NO: 33974 - RNA, 20 nt, Artificial Sequence
  Guide RNA
cagagcaguccgugauauaa

SEQ ID NO: 33975 - RNA, 20 nt, Artificial Sequence
  Guide RNA
caguuucucaaagcaguccg

SEQ ID NO: 33976 - RNA, 20 nt, Artificial Sequence
  Guide RNA
caguuucucagagcaguccg

SEQ ID NO: 33977 - RNA, 20 nt, Artificial Sequence
  Guide RNA
caucaguuucucaaagcagu

SEQ ID NO: 33978 - RNA, 20 nt, Artificial Sequence
  Guide RNA
caucaguuucucagagcagu

SEQ ID NO: 33979 - RNA, 20 nt, Artificial Sequence
  Guide RNA
cggacugcucugagaaacug

SEQ ID NO: 33980 - RNA, 20 nt, Artificial Sequence
  Guide RNA
cggacugcuuugagaaacug

SEQ ID NO: 33981 - RNA, 20 nt, Artificial Sequence
  Guide RNA
cucaaagcaguccgugauau

SEQ ID NO: 33982 - RNA, 20 nt, Artificial Sequence
  Guide RNA
cucagagcaguccgugauau

SEQ ID NO: 33983 - RNA, 20 nt, Artificial Sequence
  Guide RNA
cucugagaaacugaugaaag

SEQ ID NO: 33984 - RNA, 20 nt, Artificial Sequence
  Guide RNA
cugcucugagaaacugauga

SEQ ID NO: 33985 - RNA, 20 nt, Artificial Sequence
  Guide RNA
cugcuuugagaaacugauga

SEQ ID NO: 33986 - RNA, 20 nt, Artificial Sequence
  Guide RNA
cuuucaucaguuucucaaag

SEQ ID NO: 33987 - RNA, 20 nt, Artificial Sequence
  Guide RNA
cuuucaucaguuucucagag

SEQ ID NO: 33988 - RNA, 20 nt, Artificial Sequence
  Guide RNA
cuuugagaaacugaugaaag

SEQ ID NO: 33989 - RNA, 20 nt, Artificial Sequence
  Guide RNA
gacugcucugagaaacugau

SEQ ID NO: 33990 - RNA, 20 nt, Artificial Sequence
  Guide RNA
gacugcuuugagaaacugau

SEQ ID NO: 33991 - RNA, 20 nt, Artificial Sequence
  Guide RNA
gauauuuauaucacggacug

SEQ ID NO: 33992 - RNA, 20 nt, Artificial Sequence
  Guide RNA
gcucugagaaacugaugaaa

SEQ ID NO: 33993 - RNA, 20 nt, Artificial Sequence
  Guide RNA
gcuuucaucaguuucucaaa

SEQ ID NO: 33994 - RNA, 20 nt, Artificial Sequence
  Guide RNA
gcuuucaucaguuucucaga

SEQ ID NO: 33995 - RNA, 20 nt, Artificial Sequence
  Guide RNA
gcuuugagaaacugaugaaa

SEQ ID NO: 33996 - RNA, 20 nt, Artificial Sequence
  Guide RNA
ggacugcucugagaaacuga

SEQ ID NO: 33997 - RNA, 20 nt, Artificial Sequence
  Guide RNA
ggacugcuuugagaaacuga

SEQ ID NO: 33998 - RNA, 20 nt, Artificial Sequence
  Guide RNA
guuucucaaagcaguccgug

SEQ ID NO: 33999 - RNA, 20 nt, Artificial Sequence
  Guide RNA
guuucucagagcaguccgug

SEQ ID NO: 34000 - RNA, 20 nt, Artificial Sequence
  Guide RNA
uagcuuucaucaguuucuca

SEQ ID NO: 34001 - RNA, 20 nt, Artificial Sequence
  Guide RNA
uauagcuuucaucaguuucu

SEQ ID NO: 34002 - RNA, 20 nt, Artificial Sequence
  Guide RNA
uauaucacggacugcucuga

SEQ ID NO: 34003 - RNA, 20 nt, Artificial Sequence
  Guide RNA
uauaucacggacugcuuuga

SEQ ID NO: 34004 - RNA, 20 nt, Artificial Sequence
  Guide RNA
uaucacggacugcucugaga

SEQ ID NO: 34005 - RNA, 20 nt, Artificial Sequence
  Guide RNA
uaucacggacugcuuugaga

SEQ ID NO: 34006 - RNA, 20 nt, Artificial Sequence
  Guide RNA
uauuuauaucacggacugcu

SEQ ID NO: 34007 - RNA, 20 nt, Artificial Sequence
  Guide RNA
ucaaagcaguccgugauaua

SEQ ID NO: 34008 - RNA, 20 nt, Artificial Sequence
  Guide RNA
ucacggacugcucugagaaa

SEQ ID NO: 34009 - RNA, 20 nt, Artificial Sequence
  Guide RNA
ucacggacugcuuugagaaa

SEQ ID NO: 34010 - RNA, 20 nt, Artificial Sequence
  Guide RNA
ucagagcaguccgugauaua

SEQ ID NO: 34011 - RNA, 20 nt, Artificial Sequence
  Guide RNA
ucaguuucucaaagcagucc

SEQ ID NO: 34012 - RNA, 20 nt, Artificial Sequence
  Guide RNA
ucaguuucucagagcagucc

SEQ ID NO: 34013 - RNA, 20 nt, Artificial Sequence
  Guide RNA
ucaucaguuucucaaagcag

SEQ ID NO: 34014 - RNA, 20 nt, Artificial Sequence
  Guide RNA
ucaucaguuucucagagcag

SEQ ID NO: 34015 - RNA, 20 nt, Artificial Sequence
  Guide RNA
ucucaaagcaguccgugaua

SEQ ID NO: 34016 - RNA, 20 nt, Artificial Sequence
  Guide RNA
ucucagagcaguccgugaua

SEQ ID NO: 34017 - RNA, 20 nt, Artificial Sequence
  Guide RNA
ucugagaaacugaugaaagc

SEQ ID NO: 34018 - RNA, 20 nt, Artificial Sequence
  Guide RNA
ugcucugagaaacugaugaa

SEQ ID NO: 34019 - RNA, 20 nt, Artificial Sequence
  Guide RNA
ugcuuugagaaacugaugaa

SEQ ID NO: 34020 - RNA, 20 nt, Artificial Sequence
  Guide RNA
uuauagcuuucaucaguuuc

SEQ ID NO: 34021 - RNA, 20 nt, Artificial Sequence
  Guide RNA
uuauaucacggacugcucug

SEQ ID NO: 34022 - RNA, 20 nt, Artificial Sequence
  Guide RNA
uuauaucacggacugcuuug

SEQ ID NO: 34023 - RNA, 20 nt, Artificial Sequence
  Guide RNA
uucaucaguuucucaaagca

SEQ ID NO: 34024 - RNA, 20 nt, Artificial Sequence
  Guide RNA
uucaucaguuucucagagca

SEQ ID NO: 34025 - RNA, 20 nt, Artificial Sequence
  Guide RNA
uucucaaagcaguccgugau

SEQ ID NO: 34026 - RNA, 20 nt, Artificial Sequence
  Guide RNA
uucucagagcaguccgugau

SEQ ID NO: 34027 - RNA, 20 nt, Artificial Sequence
  Guide RNA
uuuauaucacggacugcucu

SEQ ID NO: 34028 - RNA, 20 nt, Artificial Sequence
  Guide RNA
uuuauaucacggacugcuuu

SEQ ID NO: 34029 - RNA, 20 nt, Artificial Sequence
  Guide RNA
uuucaucaguuucucaaagc

SEQ ID NO: 34030 - RNA, 20 nt, Artificial Sequence
  Guide RNA
uuucaucaguuucucagagc

SEQ ID NO: 34031 - RNA, 20 nt, Artificial Sequence
  Guide RNA
uuucucaaagcaguccguga

SEQ ID NO: 34032 - RNA, 20 nt, Artificial Sequence
  Guide RNA
uuucucagagcaguccguga

SEQ ID NO: 34033 - RNA, 20 nt, Artificial Sequence
  Guide RNA
uuugagaaacugaugaaagc

SEQ ID NO: 34034 - RNA, 21 nt, Artificial Sequence
  Guide RNA
aaagcaguccgugauauaaau

SEQ ID NO: 34035 - RNA, 21 nt, Artificial Sequence
  Guide RNA
acggacugcucugagaaacug

SEQ ID NO: 34036 - RNA, 21 nt, Artificial Sequence
  Guide RNA
acggacugcuuugagaaacug

SEQ ID NO: 34037 - RNA, 21 nt, Artificial Sequence
  Guide RNA
acugcucugagaaacugauga

SEQ ID NO: 34038 - RNA, 21 nt, Artificial Sequence
  Guide RNA
acugcuuugagaaacugauga

SEQ ID NO: 34039 - RNA, 21 nt, Artificial Sequence
  Guide RNA
agagcaguccgugauauaaau

SEQ ID NO: 34040 - RNA, 21 nt, Artificial Sequence
  Guide RNA
agauauuuauaucacggacug

SEQ ID NO: 34041 - RNA, 21 nt, Artificial Sequence
  Guide RNA
agcuuucaucaguuucucaaa

SEQ ID NO: 34042 - RNA, 21 nt, Artificial Sequence
  Guide RNA
agcuuucaucaguuucucaga

SEQ ID NO: 34043 - RNA, 21 nt, Artificial Sequence
  Guide RNA
aguuucucaaagcaguccgug

SEQ ID NO: 34044 - RNA, 21 nt, Artificial Sequence
  Guide RNA
aguuucucagagcaguccgug

SEQ ID NO: 34045 - RNA, 21 nt, Artificial Sequence
  Guide RNA
auagcuuucaucaguuucuca

SEQ ID NO: 34046 - RNA, 21 nt, Artificial Sequence
  Guide RNA
auaucacggacugcucugaga

SEQ ID NO: 34047 - RNA, 21 nt, Artificial Sequence
  Guide RNA
auaucacggacugcuuugaga

SEQ ID NO: 34048 - RNA, 21 nt, Artificial Sequence
  Guide RNA
auauuuauaucacggacugcu

SEQ ID NO: 34049 - RNA, 21 nt, Artificial Sequence
  Guide RNA
aucacggacugcucugagaaa

SEQ ID NO: 34050 - RNA, 21 nt, Artificial Sequence
  Guide RNA
aucacggacugcuuugagaaa

SEQ ID NO: 34051 - RNA, 21 nt, Artificial Sequence
  Guide RNA
aucaguuucucaaagcagucc

SEQ ID NO: 34052 - RNA, 21 nt, Artificial Sequence
  Guide RNA
aucaguuucucagagcagucc

SEQ ID NO: 34053 - RNA, 21 nt, Artificial Sequence
  Guide RNA
auuuauaucacggacugcucu

SEQ ID NO: 34054 - RNA, 21 nt, Artificial Sequence
  Guide RNA
auuuauaucacggacugcuuu

SEQ ID NO: 34055 - RNA, 21 nt, Artificial Sequence
  Guide RNA
caaagcaguccgugauauaaa

SEQ ID NO: 34056 - RNA, 21 nt, Artificial Sequence
  Guide RNA
cacggacugcucugagaaacu

SEQ ID NO: 34057 - RNA, 21 nt, Artificial Sequence
  Guide RNA
cacggacugcuuugagaaacu

SEQ ID NO: 34058 - RNA, 21 nt, Artificial Sequence
  Guide RNA
cagagcaguccgugauauaaa

SEQ ID NO: 34059 - RNA, 21 nt, Artificial Sequence
  Guide RNA
cagauauuuauaucacggacu

SEQ ID NO: 34060 - RNA, 21 nt, Artificial Sequence
  Guide RNA
caguuucucaaagcaguccgu

SEQ ID NO: 34061 - RNA, 21 nt, Artificial Sequence
  Guide RNA
caguuucucagagcaguccgu

SEQ ID NO: 34062 - RNA, 21 nt, Artificial Sequence
  Guide RNA
caucaguuucucaaagcaguc

SEQ ID NO: 34063 - RNA, 21 nt, Artificial Sequence
  Guide RNA
caucaguuucucagagcaguc

SEQ ID NO: 34064 - RNA, 21 nt, Artificial Sequence
  Guide RNA
cggacugcucugagaaacuga

SEQ ID NO: 34065 - RNA, 21 nt, Artificial Sequence
  Guide RNA
cggacugcuuugagaaacuga

SEQ ID NO: 34066 - RNA, 21 nt, Artificial Sequence
  Guide RNA
cucaaagcaguccgugauaua

SEQ ID NO: 34067 - RNA, 21 nt, Artificial Sequence
  Guide RNA
cucagagcaguccgugauaua

SEQ ID NO: 34068 - RNA, 21 nt, Artificial Sequence
  Guide RNA
cucugagaaacugaugaaagc

SEQ ID NO: 34069 - RNA, 21 nt, Artificial Sequence
  Guide RNA
cugcucugagaaacugaugaa

SEQ ID NO: 34070 - RNA, 21 nt, Artificial Sequence
  Guide RNA
cugcuuugagaaacugaugaa

SEQ ID NO: 34071 - RNA, 21 nt, Artificial Sequence
  Guide RNA
cuuucaucaguuucucaaagc

SEQ ID NO: 34072 - RNA, 21 nt, Artificial Sequence
  Guide RNA
cuuucaucaguuucucagagc

SEQ ID NO: 34073 - RNA, 21 nt, Artificial Sequence
  Guide RNA
cuuugagaaacugaugaaagc

SEQ ID NO: 34074 - RNA, 21 nt, Artificial Sequence
  Guide RNA
gacugcucugagaaacugaug

SEQ ID NO: 34075 - RNA, 21 nt, Artificial Sequence
  Guide RNA
gacugcuuugagaaacugaug

SEQ ID NO: 34076 - RNA, 21 nt, Artificial Sequence
  Guide RNA
gauauuuauaucacggacugc

SEQ ID NO: 34077 - RNA, 21 nt, Artificial Sequence
  Guide RNA
gcucugagaaacugaugaaag

SEQ ID NO: 34078 - RNA, 21 nt, Artificial Sequence
  Guide RNA
gcuuucaucaguuucucaaag

SEQ ID NO: 34079 - RNA, 21 nt, Artificial Sequence
  Guide RNA
gcuuucaucaguuucucagag

SEQ ID NO: 34080 - RNA, 21 nt, Artificial Sequence
  Guide RNA
gcuuugagaaacugaugaaag

SEQ ID NO: 34081 - RNA, 21 nt, Artificial Sequence
  Guide RNA
ggacugcucugagaaacugau

SEQ ID NO: 34082 - RNA, 21 nt, Artificial Sequence
  Guide RNA
ggacugcuuugagaaacugau

SEQ ID NO: 34083 - RNA, 21 nt, Artificial Sequence
  Guide RNA
guuucucaaagcaguccguga

SEQ ID NO: 34084 - RNA, 21 nt, Artificial Sequence
  Guide RNA
guuucucagagcaguccguga

SEQ ID NO: 34085 - RNA, 21 nt, Artificial Sequence
  Guide RNA
uagcuuucaucaguuucucaa

SEQ ID NO: 34086 - RNA, 21 nt, Artificial Sequence
  Guide RNA
uagcuuucaucaguuucucag

SEQ ID NO: 34087 - RNA, 21 nt, Artificial Sequence
  Guide RNA
uauagcuuucaucaguuucuc

SEQ ID NO: 34088 - RNA, 21 nt, Artificial Sequence
  Guide RNA
uauaucacggacugcucugag

SEQ ID NO: 34089 - RNA, 21 nt, Artificial Sequence
  Guide RNA
uauaucacggacugcuuugag

SEQ ID NO: 34090 - RNA, 21 nt, Artificial Sequence
  Guide RNA
uaucacggacugcucugagaa

SEQ ID NO: 34091 - RNA, 21 nt, Artificial Sequence
  Guide RNA
uaucacggacugcuuugagaa

SEQ ID NO: 34092 - RNA, 21 nt, Artificial Sequence
  Guide RNA
uauuuauaucacggacugcuc

SEQ ID NO: 34093 - RNA, 21 nt, Artificial Sequence
  Guide RNA
uauuuauaucacggacugcuu

SEQ ID NO: 34094 - RNA, 21 nt, Artificial Sequence
  Guide RNA
ucaaagcaguccgugauauaa

SEQ ID NO: 34095 - RNA, 21 nt, Artificial Sequence
  Guide RNA
ucacggacugcucugagaaac

SEQ ID NO: 34096 - RNA, 21 nt, Artificial Sequence
  Guide RNA
ucacggacugcuuugagaaac

SEQ ID NO: 34097 - RNA, 21 nt, Artificial Sequence
  Guide RNA
ucagagcaguccgugauauaa

SEQ ID NO: 34098 - RNA, 21 nt, Artificial Sequence
  Guide RNA
ucaguuucucaaagcaguccg

SEQ ID NO: 34099 - RNA, 21 nt, Artificial Sequence
  Guide RNA
ucaguuucucagagcaguccg

SEQ ID NO: 34100 - RNA, 21 nt, Artificial Sequence
  Guide RNA
ucaucaguuucucaaagcagu

SEQ ID NO: 34101 - RNA, 21 nt, Artificial Sequence
  Guide RNA
ucaucaguuucucagagcagu

SEQ ID NO: 34102 - RNA, 21 nt, Artificial Sequence
  Guide RNA
ucucaaagcaguccgugauau

SEQ ID NO: 34103 - RNA, 21 nt, Artificial Sequence
  Guide RNA
ucucagagcaguccgugauau

SEQ ID NO: 34104 - RNA, 21 nt, Artificial Sequence
  Guide RNA
ucugagaaacugaugaaagcu

SEQ ID NO: 34105 - RNA, 21 nt, Artificial Sequence
  Guide RNA
ugcucugagaaacugaugaaa

SEQ ID NO: 34106 - RNA, 21 nt, Artificial Sequence
  Guide RNA
ugcuuugagaaacugaugaaa

SEQ ID NO: 34107 - RNA, 21 nt, Artificial Sequence
  Guide RNA
uuauaucacggacugcucuga

SEQ ID NO: 34108 - RNA, 21 nt, Artificial Sequence
  Guide RNA
uuauaucacggacugcuuuga

SEQ ID NO: 34109 - RNA, 21 nt, Artificial Sequence
  Guide RNA
uucaucaguuucucaaagcag

SEQ ID NO: 34110 - RNA, 21 nt, Artificial Sequence
  Guide RNA
uucaucaguuucucagagcag

SEQ ID NO: 34111 - RNA, 21 nt, Artificial Sequence
  Guide RNA
uucucaaagcaguccgugaua

SEQ ID NO: 34112 - RNA, 21 nt, Artificial Sequence
  Guide RNA
uucucagagcaguccgugaua

SEQ ID NO: 34113 - RNA, 21 nt, Artificial Sequence
  Guide RNA
uuuauaucacggacugcucug

SEQ ID NO: 34114 - RNA, 21 nt, Artificial Sequence
  Guide RNA
uuuauaucacggacugcuuug

SEQ ID NO: 34115 - RNA, 21 nt, Artificial Sequence
  Guide RNA
uuucaucaguuucucaaagca

SEQ ID NO: 34116 - RNA, 21 nt, Artificial Sequence
  Guide RNA
uuucaucaguuucucagagca

SEQ ID NO: 34117 - RNA, 21 nt, Artificial Sequence
  Guide RNA
uuucucaaagcaguccgugau

SEQ ID NO: 34118 - RNA, 21 nt, Artificial Sequence
  Guide RNA
uuucucagagcaguccgugau

SEQ ID NO: 34119 - RNA, 21 nt, Artificial Sequence
  Guide RNA
uuugagaaacugaugaaagcu

SEQ ID NO: 34120 - RNA, 22 nt, Artificial Sequence
  Guide RNA
aaagcaguccgugauauaaaua

SEQ ID NO: 34121 - RNA, 22 nt, Artificial Sequence
  Guide RNA
acagauauuuauaucacggacu

SEQ ID NO: 34122 - RNA, 22 nt, Artificial Sequence
  Guide RNA
acggacugcucugagaaacuga

SEQ ID NO: 34123 - RNA, 22 nt, Artificial Sequence
  Guide RNA
acggacugcuuugagaaacuga

SEQ ID NO: 34124 - RNA, 22 nt, Artificial Sequence
  Guide RNA
acugcucugagaaacugaugaa

SEQ ID NO: 34125 - RNA, 22 nt, Artificial Sequence
  Guide RNA
acugcuuugagaaacugaugaa

SEQ ID NO: 34126 - RNA, 22 nt, Artificial Sequence
  Guide RNA
agagcaguccgugauauaaaua

SEQ ID NO: 34127 - RNA, 22 nt, Artificial Sequence
  Guide RNA
agauauuuauaucacggacugc

SEQ ID NO: 34128 - RNA, 22 nt, Artificial Sequence
  Guide RNA
agcuuucaucaguuucucaaag

SEQ ID NO: 34129 - RNA, 22 nt, Artificial Sequence
  Guide RNA
agcuuucaucaguuucucagag

SEQ ID NO: 34130 - RNA, 22 nt, Artificial Sequence
  Guide RNA
aguuucucaaagcaguccguga

SEQ ID NO: 34131 - RNA, 22 nt, Artificial Sequence
  Guide RNA
aguuucucagagcaguccguga

SEQ ID NO: 34132 - RNA, 22 nt, Artificial Sequence
  Guide RNA
auagcuuucaucaguuucucaa

SEQ ID NO: 34133 - RNA, 22 nt, Artificial Sequence
  Guide RNA
auagcuuucaucaguuucucag

SEQ ID NO: 34134 - RNA, 22 nt, Artificial Sequence
  Guide RNA
auaucacggacugcucugagaa

SEQ ID NO: 34135 - RNA, 22 nt, Artificial Sequence
  Guide RNA
auaucacggacugcuuugagaa

SEQ ID NO: 34136 - RNA, 22 nt, Artificial Sequence
  Guide RNA
auauuuauaucacggacugcuc

SEQ ID NO: 34137 - RNA, 22 nt, Artificial Sequence
  Guide RNA
auauuuauaucacggacugcuu

SEQ ID NO: 34138 - RNA, 22 nt, Artificial Sequence
  Guide RNA
aucacggacugcucugagaaac

SEQ ID NO: 34139 - RNA, 22 nt, Artificial Sequence
  Guide RNA
aucacggacugcuuugagaaac

SEQ ID NO: 34140 - RNA, 22 nt, Artificial Sequence
  Guide RNA
aucaguuucucaaagcaguccg

SEQ ID NO: 34141 - RNA, 22 nt, Artificial Sequence
  Guide RNA
aucaguuucucagagcaguccg

SEQ ID NO: 34142 - RNA, 22 nt, Artificial Sequence
  Guide RNA
auuuauaucacggacugcucug

SEQ ID NO: 34143 - RNA, 22 nt, Artificial Sequence
  Guide RNA
auuuauaucacggacugcuuug

SEQ ID NO: 34144 - RNA, 22 nt, Artificial Sequence
  Guide RNA
caaagcaguccgugauauaaau

SEQ ID NO: 34145 - RNA, 22 nt, Artificial Sequence
  Guide RNA
cacggacugcucugagaaacug

SEQ ID NO: 34146 - RNA, 22 nt, Artificial Sequence
  Guide RNA
cacggacugcuuugagaaacug

SEQ ID NO: 34147 - RNA, 22 nt, Artificial Sequence
  Guide RNA
cagagcaguccgugauauaaau

SEQ ID NO: 34148 - RNA, 22 nt, Artificial Sequence
  Guide RNA
cagauauuuauaucacggacug

SEQ ID NO: 34149 - RNA, 22 nt, Artificial Sequence
  Guide RNA
caguuucucaaagcaguccgug

SEQ ID NO: 34150 - RNA, 22 nt, Artificial Sequence
  Guide RNA
caguuucucagagcaguccgug

SEQ ID NO: 34151 - RNA, 22 nt, Artificial Sequence
  Guide RNA
caucaguuucucaaagcagucc

SEQ ID NO: 34152 - RNA, 22 nt, Artificial Sequence
  Guide RNA
caucaguuucucagagcagucc

SEQ ID NO: 34153 - RNA, 22 nt, Artificial Sequence
  Guide RNA
cggacugcucugagaaacugau

SEQ ID NO: 34154 - RNA, 22 nt, Artificial Sequence
  Guide RNA
cggacugcuuugagaaacugau

SEQ ID NO: 34155 - RNA, 22 nt, Artificial Sequence
  Guide RNA
cucaaagcaguccgugauauaa

SEQ ID NO: 34156 - RNA, 22 nt, Artificial Sequence
  Guide RNA
cucagagcaguccgugauauaa

SEQ ID NO: 34157 - RNA, 22 nt, Artificial Sequence
  Guide RNA
cucugagaaacugaugaaagcu

SEQ ID NO: 34158 - RNA, 22 nt, Artificial Sequence
  Guide RNA
cugcucugagaaacugaugaaa

SEQ ID NO: 34159 - RNA, 22 nt, Artificial Sequence
  Guide RNA
cugcuuugagaaacugaugaaa

SEQ ID NO: 34160 - RNA, 22 nt, Artificial Sequence
  Guide RNA
cuuucaucaguuucucaaagca

SEQ ID NO: 34161 - RNA, 22 nt, Artificial Sequence
  Guide RNA
cuuucaucaguuucucagagca

SEQ ID NO: 34162 - RNA, 22 nt, Artificial Sequence
  Guide RNA
cuuugagaaacugaugaaagcu

SEQ ID NO: 34163 - RNA, 22 nt, Artificial Sequence
  Guide RNA
gacugcucugagaaacugauga

SEQ ID NO: 34164 - RNA, 22 nt, Artificial Sequence
  Guide RNA
gacugcuuugagaaacugauga

SEQ ID NO: 34165 - RNA, 22 nt, Artificial Sequence
  Guide RNA
gauauuuauaucacggacugcu

SEQ ID NO: 34166 - RNA, 22 nt, Artificial Sequence
  Guide RNA
gcucugagaaacugaugaaagc

SEQ ID NO: 34167 - RNA, 22 nt, Artificial Sequence
  Guide RNA
gcuuucaucaguuucucaaagc

SEQ ID NO: 34168 - RNA, 22 nt, Artificial Sequence
  Guide RNA
gcuuucaucaguuucucagagc

SEQ ID NO: 34169 - RNA, 22 nt, Artificial Sequence
  Guide RNA
gcuuugagaaacugaugaaagc

SEQ ID NO: 34170 - RNA, 22 nt, Artificial Sequence
  Guide RNA
ggacugcucugagaaacugaug

SEQ ID NO: 34171 - RNA, 22 nt, Artificial Sequence
  Guide RNA
ggacugcuuugagaaacugaug

SEQ ID NO: 34172 - RNA, 22 nt, Artificial Sequence
  Guide RNA
guuucucaaagcaguccgugau

SEQ ID NO: 34173 - RNA, 22 nt, Artificial Sequence
  Guide RNA
guuucucagagcaguccgugau

SEQ ID NO: 34174 - RNA, 22 nt, Artificial Sequence
  Guide RNA
uagcuuucaucaguuucucaaa

SEQ ID NO: 34175 - RNA, 22 nt, Artificial Sequence
  Guide RNA
uagcuuucaucaguuucucaga

SEQ ID NO: 34176 - RNA, 22 nt, Artificial Sequence
  Guide RNA
uauagcuuucaucaguuucuca

SEQ ID NO: 34177 - RNA, 22 nt, Artificial Sequence
  Guide RNA
uauaucacggacugcucugaga

SEQ ID NO: 34178 - RNA, 22 nt, Artificial Sequence
  Guide RNA
uauaucacggacugcuuugaga

SEQ ID NO: 34179 - RNA, 22 nt, Artificial Sequence
  Guide RNA
uaucacggacugcucugagaaa

SEQ ID NO: 34180 - RNA, 22 nt, Artificial Sequence
  Guide RNA
uaucacggacugcuuugagaaa

SEQ ID NO: 34181 - RNA, 22 nt, Artificial Sequence
  Guide RNA
uauuuauaucacggacugcucu

SEQ ID NO: 34182 - RNA, 22 nt, Artificial Sequence
  Guide RNA
uauuuauaucacggacugcuuu

SEQ ID NO: 34183 - RNA, 22 nt, Artificial Sequence
  Guide RNA
ucaaagcaguccgugauauaaa

SEQ ID NO: 34184 - RNA, 22 nt, Artificial Sequence
  Guide RNA
ucacggacugcucugagaaacu

SEQ ID NO: 34185 - RNA, 22 nt, Artificial Sequence
  Guide RNA
ucacggacugcuuugagaaacu

SEQ ID NO: 34186 - RNA, 22 nt, Artificial Sequence
  Guide RNA
ucagagcaguccgugauauaaa

SEQ ID NO: 34187 - RNA, 22 nt, Artificial Sequence
  Guide RNA
ucaguuucucaaagcaguccgu

SEQ ID NO: 34188 - RNA, 22 nt, Artificial Sequence
  Guide RNA
ucaguuucucagagcaguccgu

SEQ ID NO: 34189 - RNA, 22 nt, Artificial Sequence
  Guide RNA
ucaucaguuucucaaagcaguc

SEQ ID NO: 34190 - RNA, 22 nt, Artificial Sequence
  Guide RNA
ucaucaguuucucagagcaguc

SEQ ID NO: 34191 - RNA, 22 nt, Artificial Sequence
  Guide RNA
ucucaaagcaguccgugauaua

SEQ ID NO: 34192 - RNA, 22 nt, Artificial Sequence
  Guide RNA
ucucagagcaguccgugauaua

SEQ ID NO: 34193 - RNA, 22 nt, Artificial Sequence
  Guide RNA
ucugagaaacugaugaaagcua

SEQ ID NO: 34194 - RNA, 22 nt, Artificial Sequence
  Guide RNA
ugcucugagaaacugaugaaag

SEQ ID NO: 34195 - RNA, 22 nt, Artificial Sequence
  Guide RNA
ugcuuugagaaacugaugaaag

SEQ ID NO: 34196 - RNA, 22 nt, Artificial Sequence
  Guide RNA
uuauagcuuucaucaguuucuc

SEQ ID NO: 34197 - RNA, 22 nt, Artificial Sequence
  Guide RNA
uuauaucacggacugcucugag

SEQ ID NO: 34198 - RNA, 22 nt, Artificial Sequence
  Guide RNA
uuauaucacggacugcuuugag

SEQ ID NO: 34199 - RNA, 22 nt, Artificial Sequence
  Guide RNA
uucaucaguuucucaaagcagu

SEQ ID NO: 34200 - RNA, 22 nt, Artificial Sequence
  Guide RNA
uucaucaguuucucagagcagu

SEQ ID NO: 34201 - RNA, 22 nt, Artificial Sequence
  Guide RNA
uucucaaagcaguccgugauau

SEQ ID NO: 34202 - RNA, 22 nt, Artificial Sequence
  Guide RNA
uucucagagcaguccgugauau

SEQ ID NO: 34203 - RNA, 22 nt, Artificial Sequence
  Guide RNA
uuuauaucacggacugcucuga

SEQ ID NO: 34204 - RNA, 22 nt, Artificial Sequence
  Guide RNA
uuuauaucacggacugcuuuga

SEQ ID NO: 34205 - RNA, 22 nt, Artificial Sequence
  Guide RNA
uuucaucaguuucucaaagcag

SEQ ID NO: 34206 - RNA, 22 nt, Artificial Sequence
  Guide RNA
uuucaucaguuucucagagcag

SEQ ID NO: 34207 - RNA, 22 nt, Artificial Sequence
  Guide RNA
uuucucaaagcaguccgugaua

SEQ ID NO: 34208 - RNA, 22 nt, Artificial Sequence
  Guide RNA
uuucucagagcaguccgugaua

SEQ ID NO: 34209 - RNA, 22 nt, Artificial Sequence
  Guide RNA
uuugagaaacugaugaaagcua

SEQ ID NO: 34210 - RNA, 20 nt, Artificial Sequence
  Guide RNA
aacauuuugggaggccaggg

SEQ ID NO: 34211 - RNA, 20 nt, Artificial Sequence
  Guide RNA
aacauuuugggaggccgggg

SEQ ID NO: 34212 - RNA, 20 nt, Artificial Sequence
  Guide RNA
aaucucaacauuuugggagg

SEQ ID NO: 34213 - RNA, 20 nt, Artificial Sequence
  Guide RNA
acauuuugggaggccagggc

SEQ ID NO: 34214 - RNA, 20 nt, Artificial Sequence
  Guide RNA
acauuuugggaggccggggc

SEQ ID NO: 34215 - RNA, 20 nt, Artificial Sequence
  Guide RNA
accugccccggccucccaaa

SEQ ID NO: 34216 - RNA, 20 nt, Artificial Sequence
  Guide RNA
accugcccuggccucccaaa

SEQ ID NO: 34217 - RNA, 20 nt, Artificial Sequence
  Guide RNA
aucucaacauuuugggaggc

SEQ ID NO: 34218 - RNA, 20 nt, Artificial Sequence
  Guide RNA
caacauuuugggaggccagg

SEQ ID NO: 34219 - RNA, 20 nt, Artificial Sequence
  Guide RNA
caacauuuugggaggccggg

SEQ ID NO: 34220 - RNA, 20 nt, Artificial Sequence
  Guide RNA
cagggcagguggaucaccug

SEQ ID NO: 34221 - RNA, 20 nt, Artificial Sequence
  Guide RNA
ccagggcagguggaucaccu

SEQ ID NO: 34222 - RNA, 20 nt, Artificial Sequence
  Guide RNA
ccccggccucccaaaauguu

SEQ ID NO: 34223 - RNA, 20 nt, Artificial Sequence
  Guide RNA
cccggccucccaaaauguug

SEQ ID NO: 34224 - RNA, 20 nt, Artificial Sequence
  Guide RNA
cccuggccucccaaaauguu

SEQ ID NO: 34225 - RNA, 20 nt, Artificial Sequence
  Guide RNA
ccggccucccaaaauguuga

SEQ ID NO: 34226 - RNA, 20 nt, Artificial Sequence
  Guide RNA
ccugccccggccucccaaaa

SEQ ID NO: 34227 - RNA, 20 nt, Artificial Sequence
  Guide RNA
ccugcccuggccucccaaaa

SEQ ID NO: 34228 - RNA, 20 nt, Artificial Sequence
  Guide RNA
ccuggccucccaaaauguug

SEQ ID NO: 34229 - RNA, 20 nt, Artificial Sequence
  Guide RNA
cucaacauuuugggaggcca

SEQ ID NO: 34230 - RNA, 20 nt, Artificial Sequence
  Guide RNA
cucaacauuuugggaggccg

SEQ ID NO: 34231 - RNA, 20 nt, Artificial Sequence
  Guide RNA
cugccccggccucccaaaau

SEQ ID NO: 34232 - RNA, 20 nt, Artificial Sequence
  Guide RNA
cugcccuggccucccaaaau

SEQ ID NO: 34233 - RNA, 20 nt, Artificial Sequence
  Guide RNA
cuggccucccaaaauguuga

SEQ ID NO: 34234 - RNA, 20 nt, Artificial Sequence
  Guide RNA
gcaggugauccaccugcccc

SEQ ID NO: 34235 - RNA, 20 nt, Artificial Sequence
  Guide RNA
gcaggugauccaccugcccu

SEQ ID NO: 34236 - RNA, 20 nt, Artificial Sequence
  Guide RNA
gccagggcagguggaucacc

SEQ ID NO: 34237 - RNA, 20 nt, Artificial Sequence
  Guide RNA
gccccggccucccaaaaugu

SEQ ID NO: 34238 - RNA, 20 nt, Artificial Sequence
  Guide RNA
gcccuggccucccaaaaugu

SEQ ID NO: 34239 - RNA, 20 nt, Artificial Sequence
  Guide RNA
ggccagggcagguggaucac

SEQ ID NO: 34240 - RNA, 20 nt, Artificial Sequence
  Guide RNA
ucaacauuuugggaggccag

SEQ ID NO: 34241 - RNA, 20 nt, Artificial Sequence
  Guide RNA
ucaacauuuugggaggccgg

SEQ ID NO: 34242 - RNA, 20 nt, Artificial Sequence
  Guide RNA
ucucaacauuuugggaggcc

SEQ ID NO: 34243 - RNA, 20 nt, Artificial Sequence
  Guide RNA
ugccccggccucccaaaaug

SEQ ID NO: 34244 - RNA, 20 nt, Artificial Sequence
  Guide RNA
ugcccuggccucccaaaaug

SEQ ID NO: 34245 - RNA, 21 nt, Artificial Sequence
  Guide RNA
aacauuuugggaggccagggc

SEQ ID NO: 34246 - RNA, 21 nt, Artificial Sequence
  Guide RNA
aacauuuugggaggccggggc

SEQ ID NO: 34247 - RNA, 21 nt, Artificial Sequence
  Guide RNA
aaucucaacauuuugggaggc

SEQ ID NO: 34248 - RNA, 21 nt, Artificial Sequence
  Guide RNA
acauuuugggaggccagggca

SEQ ID NO: 34249 - RNA, 21 nt, Artificial Sequence
  Guide RNA
acauuuugggaggccggggca

SEQ ID NO: 34250 - RNA, 21 nt, Artificial Sequence
  Guide RNA
accugccccggccucccaaaa

SEQ ID NO: 34251 - RNA, 21 nt, Artificial Sequence
  Guide RNA
accugcccuggccucccaaaa

SEQ ID NO: 34252 - RNA, 21 nt, Artificial Sequence
  Guide RNA
aggccagggcagguggaucac

SEQ ID NO: 34253 - RNA, 21 nt, Artificial Sequence
  Guide RNA
aucucaacauuuugggaggcc

SEQ ID NO: 34254 - RNA, 21 nt, Artificial Sequence
  Guide RNA
caacauuuugggaggccaggg

SEQ ID NO: 34255 - RNA, 21 nt, Artificial Sequence
  Guide RNA
caacauuuugggaggccgggg

SEQ ID NO: 34256 - RNA, 21 nt, Artificial Sequence
  Guide RNA
caccugccccggccucccaaa

SEQ ID NO: 34257 - RNA, 21 nt, Artificial Sequence
  Guide RNA
caccugcccuggccucccaaa

SEQ ID NO: 34258 - RNA, 21 nt, Artificial Sequence
  Guide RNA
cagggcagguggaucaccugc

SEQ ID NO: 34259 - RNA, 21 nt, Artificial Sequence
  Guide RNA
ccagggcagguggaucaccug

SEQ ID NO: 34260 - RNA, 21 nt, Artificial Sequence
  Guide RNA
ccccggccucccaaaauguug

SEQ ID NO: 34261 - RNA, 21 nt, Artificial Sequence
  Guide RNA
cccggccucccaaaauguuga

SEQ ID NO: 34262 - RNA, 21 nt, Artificial Sequence
  Guide RNA
cccuggccucccaaaauguug

SEQ ID NO: 34263 - RNA, 21 nt, Artificial Sequence
  Guide RNA
ccggccucccaaaauguugag

SEQ ID NO: 34264 - RNA, 21 nt, Artificial Sequence
  Guide RNA
ccugccccggccucccaaaau

SEQ ID NO: 34265 - RNA, 21 nt, Artificial Sequence
  Guide RNA
ccugcccuggccucccaaaau

SEQ ID NO: 34266 - RNA, 21 nt, Artificial Sequence
  Guide RNA
ccuggccucccaaaauguuga

SEQ ID NO: 34267 - RNA, 21 nt, Artificial Sequence
  Guide RNA
cgcaggugauccaccugcccu

SEQ ID NO: 34268 - RNA, 21 nt, Artificial Sequence
  Guide RNA
cucaacauuuugggaggccag

SEQ ID NO: 34269 - RNA, 21 nt, Artificial Sequence
  Guide RNA
cucaacauuuugggaggccgg

SEQ ID NO: 34270 - RNA, 21 nt, Artificial Sequence
  Guide RNA
cugccccggccucccaaaaug

SEQ ID NO: 34271 - RNA, 21 nt, Artificial Sequence
  Guide RNA
cugcccuggccucccaaaaug

SEQ ID NO: 34272 - RNA, 21 nt, Artificial Sequence
  Guide RNA
cuggccucccaaaauguugag

SEQ ID NO: 34273 - RNA, 21 nt, Artificial Sequence
  Guide RNA
gcaggugauccaccugccccg

SEQ ID NO: 34274 - RNA, 21 nt, Artificial Sequence
  Guide RNA
gcaggugauccaccugcccug

SEQ ID NO: 34275 - RNA, 21 nt, Artificial Sequence
  Guide RNA
gccagggcagguggaucaccu

SEQ ID NO: 34276 - RNA, 21 nt, Artificial Sequence
  Guide RNA
gccccggccucccaaaauguu

SEQ ID NO: 34277 - RNA, 21 nt, Artificial Sequence
  Guide RNA
gcccuggccucccaaaauguu

SEQ ID NO: 34278 - RNA, 21 nt, Artificial Sequence
  Guide RNA
ggccagggcagguggaucacc

SEQ ID NO: 34279 - RNA, 21 nt, Artificial Sequence
  Guide RNA
uaaucucaacauuuugggagg

SEQ ID NO: 34280 - RNA, 21 nt, Artificial Sequence
  Guide RNA
ucaacauuuugggaggccagg

SEQ ID NO: 34281 - RNA, 21 nt, Artificial Sequence
  Guide RNA
ucaacauuuugggaggccggg

SEQ ID NO: 34282 - RNA, 21 nt, Artificial Sequence
  Guide RNA
ucucaacauuuugggaggcca

SEQ ID NO: 34283 - RNA, 21 nt, Artificial Sequence
  Guide RNA
ucucaacauuuugggaggccg

SEQ ID NO: 34284 - RNA, 21 nt, Artificial Sequence
  Guide RNA
ugccccggccucccaaaaugu

SEQ ID NO: 34285 - RNA, 21 nt, Artificial Sequence
  Guide RNA
ugcccuggccucccaaaaugu

SEQ ID NO: 34286 - RNA, 22 nt, Artificial Sequence
  Guide RNA
aacauuuugggaggccagggca

SEQ ID NO: 34287 - RNA, 22 nt, Artificial Sequence
  Guide RNA
aacauuuugggaggccggggca

SEQ ID NO: 34288 - RNA, 22 nt, Artificial Sequence
  Guide RNA
aaucucaacauuuugggaggcc

SEQ ID NO: 34289 - RNA, 22 nt, Artificial Sequence
  Guide RNA
acauuuugggaggccagggcag

SEQ ID NO: 34290 - RNA, 22 nt, Artificial Sequence
  Guide RNA
acauuuugggaggccggggcag

SEQ ID NO: 34291 - RNA, 22 nt, Artificial Sequence
  Guide RNA
accugccccggccucccaaaau

SEQ ID NO: 34292 - RNA, 22 nt, Artificial Sequence
  Guide RNA
accugcccuggccucccaaaau

SEQ ID NO: 34293 - RNA, 22 nt, Artificial Sequence
  Guide RNA
aggccagggcagguggaucacc

SEQ ID NO: 34294 - RNA, 22 nt, Artificial Sequence
  Guide RNA
aucucaacauuuugggaggcca

SEQ ID NO: 34295 - RNA, 22 nt, Artificial Sequence
  Guide RNA
aucucaacauuuugggaggccg

SEQ ID NO: 34296 - RNA, 22 nt, Artificial Sequence
  Guide RNA
caacauuuugggaggccagggc

SEQ ID NO: 34297 - RNA, 22 nt, Artificial Sequence
  Guide RNA
caacauuuugggaggccggggc

SEQ ID NO: 34298 - RNA, 22 nt, Artificial Sequence
  Guide RNA
caccugccccggccucccaaaa

SEQ ID NO: 34299 - RNA, 22 nt, Artificial Sequence
  Guide RNA
caccugcccuggccucccaaaa

SEQ ID NO: 34300 - RNA, 22 nt, Artificial Sequence
  Guide RNA
cagggcagguggaucaccugcg

SEQ ID NO: 34301 - RNA, 22 nt, Artificial Sequence
  Guide RNA
ccaccugccccggccucccaaa

SEQ ID NO: 34302 - RNA, 22 nt, Artificial Sequence
  Guide RNA
ccaccugcccuggccucccaaa

SEQ ID NO: 34303 - RNA, 22 nt, Artificial Sequence
  Guide RNA
ccagggcagguggaucaccugc

SEQ ID NO: 34304 - RNA, 22 nt, Artificial Sequence
  Guide RNA
ccccggccucccaaaauguuga

SEQ ID NO: 34305 - RNA, 22 nt, Artificial Sequence
  Guide RNA
cccggccucccaaaauguugag

SEQ ID NO: 34306 - RNA, 22 nt, Artificial Sequence
  Guide RNA
cccuggccucccaaaauguuga

SEQ ID NO: 34307 - RNA, 22 nt, Artificial Sequence
  Guide RNA
ccggccucccaaaauguugaga

SEQ ID NO: 34308 - RNA, 22 nt, Artificial Sequence
  Guide RNA
ccugccccggccucccaaaaug

SEQ ID NO: 34309 - RNA, 22 nt, Artificial Sequence
  Guide RNA
ccugcccuggccucccaaaaug

SEQ ID NO: 34310 - RNA, 22 nt, Artificial Sequence
  Guide RNA
ccuggccucccaaaauguugag

SEQ ID NO: 34311 - RNA, 22 nt, Artificial Sequence
  Guide RNA
cgcaggugauccaccugcccug

SEQ ID NO: 34312 - RNA, 22 nt, Artificial Sequence
  Guide RNA
cucaacauuuugggaggccagg

SEQ ID NO: 34313 - RNA, 22 nt, Artificial Sequence
  Guide RNA
cucaacauuuugggaggccggg

SEQ ID NO: 34314 - RNA, 22 nt, Artificial Sequence
  Guide RNA
cugccccggccucccaaaaugu

SEQ ID NO: 34315 - RNA, 22 nt, Artificial Sequence
  Guide RNA
cugcccuggccucccaaaaugu

SEQ ID NO: 34316 - RNA, 22 nt, Artificial Sequence
  Guide RNA
cuggccucccaaaauguugaga

SEQ ID NO: 34317 - RNA, 22 nt, Artificial Sequence
  Guide RNA
gaggccagggcagguggaucac

SEQ ID NO: 34318 - RNA, 22 nt, Artificial Sequence
  Guide RNA
gcaggugauccaccugccccgg

SEQ ID NO: 34319 - RNA, 22 nt, Artificial Sequence
  Guide RNA
gcaggugauccaccugcccugg

SEQ ID NO: 34320 - RNA, 22 nt, Artificial Sequence
  Guide RNA
gccagggcagguggaucaccug

SEQ ID NO: 34321 - RNA, 22 nt, Artificial Sequence
  Guide RNA
gccccggccucccaaaauguug

SEQ ID NO: 34322 - RNA, 22 nt, Artificial Sequence
  Guide RNA
gcccuggccucccaaaauguug

SEQ ID NO: 34323 - RNA, 22 nt, Artificial Sequence
  Guide RNA
ggccagggcagguggaucaccu

SEQ ID NO: 34324 - RNA, 22 nt, Artificial Sequence
  Guide RNA
guaaucucaacauuuugggagg

SEQ ID NO: 34325 - RNA, 22 nt, Artificial Sequence
  Guide RNA
uaaucucaacauuuugggaggc

SEQ ID NO: 34326 - RNA, 22 nt, Artificial Sequence
  Guide RNA
ucaacauuuugggaggccaggg

SEQ ID NO: 34327 - RNA, 22 nt, Artificial Sequence
  Guide RNA
ucaacauuuugggaggccgggg

SEQ ID NO: 34328 - RNA, 22 nt, Artificial Sequence
  Guide RNA
ucgcaggugauccaccugcccu

SEQ ID NO: 34329 - RNA, 22 nt, Artificial Sequence
  Guide RNA
ucucaacauuuugggaggccag

SEQ ID NO: 34330 - RNA, 22 nt, Artificial Sequence
  Guide RNA
ucucaacauuuugggaggccgg

SEQ ID NO: 34331 - RNA, 22 nt, Artificial Sequence
  Guide RNA
ugccccggccucccaaaauguu

SEQ ID NO: 34332 - RNA, 22 nt, Artificial Sequence
  Guide RNA
ugcccuggccucccaaaauguu

SEQ ID NO: 34333 - RNA, 20 nt, Artificial Sequence
  Guide RNA
aaccccuucacccuccccac

SEQ ID NO: 34334 - RNA, 20 nt, Artificial Sequence
  Guide RNA
aaccccuucaccuuccccac

SEQ ID NO: 34335 - RNA, 20 nt, Artificial Sequence
  Guide RNA
aagaaccccuucacccuccc

SEQ ID NO: 34336 - RNA, 20 nt, Artificial Sequence
  Guide RNA
aagaaccccuucaccuuccc

SEQ ID NO: 34337 - RNA, 20 nt, Artificial Sequence
  Guide RNA
aaggcacugguggggaaggu

SEQ ID NO: 34338 - RNA, 20 nt, Artificial Sequence
  Guide RNA
aaggcacugguggggagggu

SEQ ID NO: 34339 - RNA, 20 nt, Artificial Sequence
  Guide RNA
aaggugaagggguucuuagu

SEQ ID NO: 34340 - RNA, 20 nt, Artificial Sequence
  Guide RNA
aauuacuaagaaccccuuca

SEQ ID NO: 34341 - RNA, 20 nt, Artificial Sequence
  Guide RNA
accccuucacccuccccacc

SEQ ID NO: 34342 - RNA, 20 nt, Artificial Sequence
  Guide RNA
accccuucaccuuccccacc

SEQ ID NO: 34343 - RNA, 20 nt, Artificial Sequence
  Guide RNA
acccuccccaccagugccuu

SEQ ID NO: 34344 - RNA, 20 nt, Artificial Sequence
  Guide RNA
accuuccccaccagugccuu

SEQ ID NO: 34345 - RNA, 20 nt, Artificial Sequence
  Guide RNA
acuaagaaccccuucacccu

SEQ ID NO: 34346 - RNA, 20 nt, Artificial Sequence
  Guide RNA
acuaagaaccccuucaccuu

SEQ ID NO: 34347 - RNA, 20 nt, Artificial Sequence
  Guide RNA
acugguggggaaggugaagg

SEQ ID NO: 34348 - RNA, 20 nt, Artificial Sequence
  Guide RNA
acugguggggagggugaagg

SEQ ID NO: 34349 - RNA, 20 nt, Artificial Sequence
  Guide RNA
agaaccccuucacccucccc

SEQ ID NO: 34350 - RNA, 20 nt, Artificial Sequence
  Guide RNA
agaaccccuucaccuucccc

SEQ ID NO: 34351 - RNA, 20 nt, Artificial Sequence
  Guide RNA
agaaggcacugguggggaag

SEQ ID NO: 34352 - RNA, 20 nt, Artificial Sequence
  Guide RNA
agaaggcacugguggggagg

SEQ ID NO: 34353 - RNA, 20 nt, Artificial Sequence
  Guide RNA
aggcacugguggggaaggug

SEQ ID NO: 34354 - RNA, 20 nt, Artificial Sequence
  Guide RNA
aggcacugguggggagggug

SEQ ID NO: 34355 - RNA, 20 nt, Artificial Sequence
  Guide RNA
agggugaagggguucuuagu

SEQ ID NO: 34356 - RNA, 20 nt, Artificial Sequence
  Guide RNA
auuacuaagaaccccuucac

SEQ ID NO: 34357 - RNA, 20 nt, Artificial Sequence
  Guide RNA
cacccuccccaccagugccu

SEQ ID NO: 34358 - RNA, 20 nt, Artificial Sequence
  Guide RNA
caccuuccccaccagugccu

SEQ ID NO: 34359 - RNA, 20 nt, Artificial Sequence
  Guide RNA
cacugguggggaaggugaag

SEQ ID NO: 34360 - RNA, 20 nt, Artificial Sequence
  Guide RNA
cacugguggggagggugaag

SEQ ID NO: 34361 - RNA, 20 nt, Artificial Sequence
  Guide RNA
cagaaggcacugguggggaa

SEQ ID NO: 34362 - RNA, 20 nt, Artificial Sequence
  Guide RNA
cagaaggcacugguggggag

SEQ ID NO: 34363 - RNA, 20 nt, Artificial Sequence
  Guide RNA
ccccuucacccuccccacca

SEQ ID NO: 34364 - RNA, 20 nt, Artificial Sequence
  Guide RNA
ccccuucaccuuccccacca

SEQ ID NO: 34365 - RNA, 20 nt, Artificial Sequence
  Guide RNA
cccuccccaccagugccuuc

SEQ ID NO: 34366 - RNA, 20 nt, Artificial Sequence
  Guide RNA
cccuucacccuccccaccag

SEQ ID NO: 34367 - RNA, 20 nt, Artificial Sequence
  Guide RNA
cccuucaccuuccccaccag

SEQ ID NO: 34368 - RNA, 20 nt, Artificial Sequence
  Guide RNA
ccuccccaccagugccuucu

SEQ ID NO: 34369 - RNA, 20 nt, Artificial Sequence
  Guide RNA
ccuucacccuccccaccagu

SEQ ID NO: 34370 - RNA, 20 nt, Artificial Sequence
  Guide RNA
ccuucaccuuccccaccagu

SEQ ID NO: 34371 - RNA, 20 nt, Artificial Sequence
  Guide RNA
ccuuccccaccagugccuuc

SEQ ID NO: 34372 - RNA, 20 nt, Artificial Sequence
  Guide RNA
cuaagaaccccuucacccuc

SEQ ID NO: 34373 - RNA, 20 nt, Artificial Sequence
  Guide RNA
cuaagaaccccuucaccuuc

SEQ ID NO: 34374 - RNA, 20 nt, Artificial Sequence
  Guide RNA
cugguggggaaggugaaggg

SEQ ID NO: 34375 - RNA, 20 nt, Artificial Sequence
  Guide RNA
cugguggggagggugaaggg

SEQ ID NO: 34376 - RNA, 20 nt, Artificial Sequence
  Guide RNA
cuucacccuccccaccagug

SEQ ID NO: 34377 - RNA, 20 nt, Artificial Sequence
  Guide RNA
cuucaccuuccccaccagug

SEQ ID NO: 34378 - RNA, 20 nt, Artificial Sequence
  Guide RNA
cuuccccaccagugccuucu

SEQ ID NO: 34379 - RNA, 20 nt, Artificial Sequence
  Guide RNA
gaaccccuucacccucccca

SEQ ID NO: 34380 - RNA, 20 nt, Artificial Sequence
  Guide RNA
gaaccccuucaccuucccca

SEQ ID NO: 34381 - RNA, 20 nt, Artificial Sequence
  Guide RNA
gaaggcacugguggggaagg

SEQ ID NO: 34382 - RNA, 20 nt, Artificial Sequence
  Guide RNA
gaaggcacugguggggaggg

SEQ ID NO: 34383 - RNA, 20 nt, Artificial Sequence
  Guide RNA
gaaggugaagggguucuuag

SEQ ID NO: 34384 - RNA, 20 nt, Artificial Sequence
  Guide RNA
gaauuacuaagaaccccuuc

SEQ ID NO: 34385 - RNA, 20 nt, Artificial Sequence
  Guide RNA
gagggugaagggguucuuag

SEQ ID NO: 34386 - RNA, 20 nt, Artificial Sequence
  Guide RNA
gcacugguggggaaggugaa

SEQ ID NO: 34387 - RNA, 20 nt, Artificial Sequence
  Guide RNA
gcacugguggggagggugaa

SEQ ID NO: 34388 - RNA, 20 nt, Artificial Sequence
  Guide RNA
gcagaaggcacuggugggga

SEQ ID NO: 34389 - RNA, 20 nt, Artificial Sequence
  Guide RNA
ggaaggugaagggguucuua

SEQ ID NO: 34390 - RNA, 20 nt, Artificial Sequence
  Guide RNA
ggagggugaagggguucuua

SEQ ID NO: 34391 - RNA, 20 nt, Artificial Sequence
  Guide RNA
ggcacugguggggaagguga

SEQ ID NO: 34392 - RNA, 20 nt, Artificial Sequence
  Guide RNA
ggcacugguggggaggguga

SEQ ID NO: 34393 - RNA, 20 nt, Artificial Sequence
  Guide RNA
ggcagaaggcacuggugggg

SEQ ID NO: 34394 - RNA, 20 nt, Artificial Sequence
  Guide RNA
gggaaggugaagggguucuu

SEQ ID NO: 34395 - RNA, 20 nt, Artificial Sequence
  Guide RNA
gggagggugaagggguucuu

SEQ ID NO: 34396 - RNA, 20 nt, Artificial Sequence
  Guide RNA
gggcagaaggcacugguggg

SEQ ID NO: 34397 - RNA, 20 nt, Artificial Sequence
  Guide RNA
ggggaaggugaagggguucu

SEQ ID NO: 34398 - RNA, 20 nt, Artificial Sequence
  Guide RNA
ggggagggugaagggguucu

SEQ ID NO: 34399 - RNA, 20 nt, Artificial Sequence
  Guide RNA
gguggggaaggugaaggggu

SEQ ID NO: 34400 - RNA, 20 nt, Artificial Sequence
  Guide RNA
gguggggagggugaaggggu

SEQ ID NO: 34401 - RNA, 20 nt, Artificial Sequence
  Guide RNA
guggggaaggugaagggguu

SEQ ID NO: 34402 - RNA, 20 nt, Artificial Sequence
  Guide RNA
guggggagggugaagggguu

SEQ ID NO: 34403 - RNA, 20 nt, Artificial Sequence
  Guide RNA
uaagaaccccuucacccucc

SEQ ID NO: 34404 - RNA, 20 nt, Artificial Sequence
  Guide RNA
uaagaaccccuucaccuucc

SEQ ID NO: 34405 - RNA, 20 nt, Artificial Sequence
  Guide RNA
uacuaagaaccccuucaccc

SEQ ID NO: 34406 - RNA, 20 nt, Artificial Sequence
  Guide RNA
uacuaagaaccccuucaccu

SEQ ID NO: 34407 - RNA, 20 nt, Artificial Sequence
  Guide RNA
ucacccuccccaccagugcc

SEQ ID NO: 34408 - RNA, 20 nt, Artificial Sequence
  Guide RNA
ucaccuuccccaccagugcc

SEQ ID NO: 34409 - RNA, 20 nt, Artificial Sequence
  Guide RNA
ugggcagaaggcacuggugg

SEQ ID NO: 34410 - RNA, 20 nt, Artificial Sequence
  Guide RNA
uggggaaggugaagggguuc

SEQ ID NO: 34411 - RNA, 20 nt, Artificial Sequence
  Guide RNA
uggggagggugaagggguuc

SEQ ID NO: 34412 - RNA, 20 nt, Artificial Sequence
  Guide RNA
ugguggggaaggugaagggg

SEQ ID NO: 34413 - RNA, 20 nt, Artificial Sequence
  Guide RNA
ugguggggagggugaagggg

SEQ ID NO: 34414 - RNA, 20 nt, Artificial Sequence
  Guide RNA
uuacuaagaaccccuucacc

SEQ ID NO: 34415 - RNA, 20 nt, Artificial Sequence
  Guide RNA
uucacccuccccaccagugc

SEQ ID NO: 34416 - RNA, 20 nt, Artificial Sequence
  Guide RNA
uucaccuuccccaccagugc

SEQ ID NO: 34417 - RNA, 21 nt, Artificial Sequence
  Guide RNA
aaccccuucacccuccccacc

SEQ ID NO: 34418 - RNA, 21 nt, Artificial Sequence
  Guide RNA
aaccccuucaccuuccccacc

SEQ ID NO: 34419 - RNA, 21 nt, Artificial Sequence
  Guide RNA
aagaaccccuucacccucccc

SEQ ID NO: 34420 - RNA, 21 nt, Artificial Sequence
  Guide RNA
aagaaccccuucaccuucccc

SEQ ID NO: 34421 - RNA, 21 nt, Artificial Sequence
  Guide RNA
aaggcacugguggggaaggug

SEQ ID NO: 34422 - RNA, 21 nt, Artificial Sequence
  Guide RNA
aaggcacugguggggagggug

SEQ ID NO: 34423 - RNA, 21 nt, Artificial Sequence
  Guide RNA
aaggugaagggguucuuagua

SEQ ID NO: 34424 - RNA, 21 nt, Artificial Sequence
  Guide RNA
aauuacuaagaaccccuucac

SEQ ID NO: 34425 - RNA, 21 nt, Artificial Sequence
  Guide RNA
accccuucacccuccccacca

SEQ ID NO: 34426 - RNA, 21 nt, Artificial Sequence
  Guide RNA
accccuucaccuuccccacca

SEQ ID NO: 34427 - RNA, 21 nt, Artificial Sequence
  Guide RNA
acccuccccaccagugccuuc

SEQ ID NO: 34428 - RNA, 21 nt, Artificial Sequence
  Guide RNA
accuuccccaccagugccuuc

SEQ ID NO: 34429 - RNA, 21 nt, Artificial Sequence
  Guide RNA
acuaagaaccccuucacccuc

SEQ ID NO: 34430 - RNA, 21 nt, Artificial Sequence
  Guide RNA
acuaagaaccccuucaccuuc

SEQ ID NO: 34431 - RNA, 21 nt, Artificial Sequence
  Guide RNA
acugguggggaaggugaaggg

SEQ ID NO: 34432 - RNA, 21 nt, Artificial Sequence
  Guide RNA
acugguggggagggugaaggg

SEQ ID NO: 34433 - RNA, 21 nt, Artificial Sequence
  Guide RNA
agaaccccuucacccucccca

SEQ ID NO: 34434 - RNA, 21 nt, Artificial Sequence
  Guide RNA
agaaccccuucaccuucccca

SEQ ID NO: 34435 - RNA, 21 nt, Artificial Sequence
  Guide RNA
agaaggcacugguggggaagg

SEQ ID NO: 34436 - RNA, 21 nt, Artificial Sequence
  Guide RNA
agaaggcacugguggggaggg

SEQ ID NO: 34437 - RNA, 21 nt, Artificial Sequence
  Guide RNA
agaauuacuaagaaccccuuc

SEQ ID NO: 34438 - RNA, 21 nt, Artificial Sequence
  Guide RNA
aggcacugguggggaagguga

SEQ ID NO: 34439 - RNA, 21 nt, Artificial Sequence
  Guide RNA
aggcacugguggggaggguga

SEQ ID NO: 34440 - RNA, 21 nt, Artificial Sequence
  Guide RNA
agggugaagggguucuuagua

SEQ ID NO: 34441 - RNA, 21 nt, Artificial Sequence
  Guide RNA
auuacuaagaaccccuucacc

SEQ ID NO: 34442 - RNA, 21 nt, Artificial Sequence
  Guide RNA
cacccuccccaccagugccuu

SEQ ID NO: 34443 - RNA, 21 nt, Artificial Sequence
  Guide RNA
caccuuccccaccagugccuu

SEQ ID NO: 34444 - RNA, 21 nt, Artificial Sequence
  Guide RNA
cacugguggggaaggugaagg

SEQ ID NO: 34445 - RNA, 21 nt, Artificial Sequence
  Guide RNA
cacugguggggagggugaagg

SEQ ID NO: 34446 - RNA, 21 nt, Artificial Sequence
  Guide RNA
cagaaggcacugguggggaag

SEQ ID NO: 34447 - RNA, 21 nt, Artificial Sequence
  Guide RNA
cagaaggcacugguggggagg

SEQ ID NO: 34448 - RNA, 21 nt, Artificial Sequence
  Guide RNA
ccccuucacccuccccaccag

SEQ ID NO: 34449 - RNA, 21 nt, Artificial Sequence
  Guide RNA
ccccuucaccuuccccaccag

SEQ ID NO: 34450 - RNA, 21 nt, Artificial Sequence
  Guide RNA
cccuccccaccagugccuucu

SEQ ID NO: 34451 - RNA, 21 nt, Artificial Sequence
  Guide RNA
cccuucacccuccccaccagu

SEQ ID NO: 34452 - RNA, 21 nt, Artificial Sequence
  Guide RNA
cccuucaccuuccccaccagu

SEQ ID NO: 34453 - RNA, 21 nt, Artificial Sequence
  Guide RNA
ccuccccaccagugccuucug

SEQ ID NO: 34454 - RNA, 21 nt, Artificial Sequence
  Guide RNA
ccuucacccuccccaccagug

SEQ ID NO: 34455 - RNA, 21 nt, Artificial Sequence
  Guide RNA
ccuucaccuuccccaccagug

SEQ ID NO: 34456 - RNA, 21 nt, Artificial Sequence
  Guide RNA
ccuuccccaccagugccuucu

SEQ ID NO: 34457 - RNA, 21 nt, Artificial Sequence
  Guide RNA
cuaagaaccccuucacccucc

SEQ ID NO: 34458 - RNA, 21 nt, Artificial Sequence
  Guide RNA
cuaagaaccccuucaccuucc

SEQ ID NO: 34459 - RNA, 21 nt, Artificial Sequence
  Guide RNA
cugggcagaaggcacuggugg

SEQ ID NO: 34460 - RNA, 21 nt, Artificial Sequence
  Guide RNA
cugguggggaaggugaagggg

SEQ ID NO: 34461 - RNA, 21 nt, Artificial Sequence
  Guide RNA
cugguggggagggugaagggg

SEQ ID NO: 34462 - RNA, 21 nt, Artificial Sequence
  Guide RNA
cuucacccuccccaccagugc

SEQ ID NO: 34463 - RNA, 21 nt, Artificial Sequence
  Guide RNA
cuucaccuuccccaccagugc

SEQ ID NO: 34464 - RNA, 21 nt, Artificial Sequence
  Guide RNA
cuuccccaccagugccuucug

SEQ ID NO: 34465 - RNA, 21 nt, Artificial Sequence
  Guide RNA
gaaccccuucacccuccccac

SEQ ID NO: 34466 - RNA, 21 nt, Artificial Sequence
  Guide RNA
gaaccccuucaccuuccccac

SEQ ID NO: 34467 - RNA, 21 nt, Artificial Sequence
  Guide RNA
gaaggcacugguggggaaggu

SEQ ID NO: 34468 - RNA, 21 nt, Artificial Sequence
  Guide RNA
gaaggcacugguggggagggu

SEQ ID NO: 34469 - RNA, 21 nt, Artificial Sequence
  Guide RNA
gaaggugaagggguucuuagu

SEQ ID NO: 34470 - RNA, 21 nt, Artificial Sequence
  Guide RNA
gaauuacuaagaaccccuuca

SEQ ID NO: 34471 - RNA, 21 nt, Artificial Sequence
  Guide RNA
gagggugaagggguucuuagu

SEQ ID NO: 34472 - RNA, 21 nt, Artificial Sequence
  Guide RNA
gcacugguggggaaggugaag

SEQ ID NO: 34473 - RNA, 21 nt, Artificial Sequence
  Guide RNA
gcacugguggggagggugaag

SEQ ID NO: 34474 - RNA, 21 nt, Artificial Sequence
  Guide RNA
gcagaaggcacugguggggaa

SEQ ID NO: 34475 - RNA, 21 nt, Artificial Sequence
  Guide RNA
gcagaaggcacugguggggag

SEQ ID NO: 34476 - RNA, 21 nt, Artificial Sequence
  Guide RNA
ggaaggugaagggguucuuag

SEQ ID NO: 34477 - RNA, 21 nt, Artificial Sequence
  Guide RNA
ggagggugaagggguucuuag

SEQ ID NO: 34478 - RNA, 21 nt, Artificial Sequence
  Guide RNA
ggcacugguggggaaggugaa

SEQ ID NO: 34479 - RNA, 21 nt, Artificial Sequence
  Guide RNA
ggcacugguggggagggugaa

SEQ ID NO: 34480 - RNA, 21 nt, Artificial Sequence
  Guide RNA
ggcagaaggcacuggugggga

SEQ ID NO: 34481 - RNA, 21 nt, Artificial Sequence
  Guide RNA
gggaaggugaagggguucuua

SEQ ID NO: 34482 - RNA, 21 nt, Artificial Sequence
  Guide RNA
gggagggugaagggguucuua

SEQ ID NO: 34483 - RNA, 21 nt, Artificial Sequence
  Guide RNA
gggcagaaggcacuggugggg

SEQ ID NO: 34484 - RNA, 21 nt, Artificial Sequence
  Guide RNA
ggggaaggugaagggguucuu

SEQ ID NO: 34485 - RNA, 21 nt, Artificial Sequence
  Guide RNA
ggggagggugaagggguucuu

SEQ ID NO: 34486 - RNA, 21 nt, Artificial Sequence
  Guide RNA
gguggggaaggugaagggguu

SEQ ID NO: 34487 - RNA, 21 nt, Artificial Sequence
  Guide RNA
gguggggagggugaagggguu

SEQ ID NO: 34488 - RNA, 21 nt, Artificial Sequence
  Guide RNA
guggggaaggugaagggguuc

SEQ ID NO: 34489 - RNA, 21 nt, Artificial Sequence
  Guide RNA
guggggagggugaagggguuc

SEQ ID NO: 34490 - RNA, 21 nt, Artificial Sequence
  Guide RNA
uaagaaccccuucacccuccc

SEQ ID NO: 34491 - RNA, 21 nt, Artificial Sequence
  Guide RNA
uaagaaccccuucaccuuccc

SEQ ID NO: 34492 - RNA, 21 nt, Artificial Sequence
  Guide RNA
uacuaagaaccccuucacccu

SEQ ID NO: 34493 - RNA, 21 nt, Artificial Sequence
  Guide RNA
uacuaagaaccccuucaccuu

SEQ ID NO: 34494 - RNA, 21 nt, Artificial Sequence
  Guide RNA
ucacccuccccaccagugccu

SEQ ID NO: 34495 - RNA, 21 nt, Artificial Sequence
  Guide RNA
ucaccuuccccaccagugccu

SEQ ID NO: 34496 - RNA, 21 nt, Artificial Sequence
  Guide RNA
ugggcagaaggcacugguggg

SEQ ID NO: 34497 - RNA, 21 nt, Artificial Sequence
  Guide RNA
uggggaaggugaagggguucu

SEQ ID NO: 34498 - RNA, 21 nt, Artificial Sequence
  Guide RNA
uggggagggugaagggguucu

SEQ ID NO: 34499 - RNA, 21 nt, Artificial Sequence
  Guide RNA
ugguggggaaggugaaggggu

SEQ ID NO: 34500 - RNA, 21 nt, Artificial Sequence
  Guide RNA
ugguggggagggugaaggggu

SEQ ID NO: 34501 - RNA, 21 nt, Artificial Sequence
  Guide RNA
uuacuaagaaccccuucaccc

SEQ ID NO: 34502 - RNA, 21 nt, Artificial Sequence
  Guide RNA
uuacuaagaaccccuucaccu

SEQ ID NO: 34503 - RNA, 21 nt, Artificial Sequence
  Guide RNA
uucacccuccccaccagugcc

SEQ ID NO: 34504 - RNA, 21 nt, Artificial Sequence
  Guide RNA
uucaccuuccccaccagugcc

SEQ ID NO: 34505 - RNA, 22 nt, Artificial Sequence
  Guide RNA
aaccccuucacccuccccacca

SEQ ID NO: 34506 - RNA, 22 nt, Artificial Sequence
  Guide RNA
aaccccuucaccuuccccacca

SEQ ID NO: 34507 - RNA, 22 nt, Artificial Sequence
  Guide RNA
aagaaccccuucacccucccca

SEQ ID NO: 34508 - RNA, 22 nt, Artificial Sequence
  Guide RNA
aagaaccccuucaccuucccca

SEQ ID NO: 34509 - RNA, 22 nt, Artificial Sequence
  Guide RNA
aaggcacugguggggaagguga

SEQ ID NO: 34510 - RNA, 22 nt, Artificial Sequence
  Guide RNA
aaggcacugguggggaggguga

SEQ ID NO: 34511 - RNA, 22 nt, Artificial Sequence
  Guide RNA
aaggugaagggguucuuaguaa

SEQ ID NO: 34512 - RNA, 22 nt, Artificial Sequence
  Guide RNA
aauuacuaagaaccccuucacc

SEQ ID NO: 34513 - RNA, 22 nt, Artificial Sequence
  Guide RNA
accccuucacccuccccaccag

SEQ ID NO: 34514 - RNA, 22 nt, Artificial Sequence
  Guide RNA
accccuucaccuuccccaccag

SEQ ID NO: 34515 - RNA, 22 nt, Artificial Sequence
  Guide RNA
acccuccccaccagugccuucu

SEQ ID NO: 34516 - RNA, 22 nt, Artificial Sequence
  Guide RNA
accuuccccaccagugccuucu

SEQ ID NO: 34517 - RNA, 22 nt, Artificial Sequence
  Guide RNA
acuaagaaccccuucacccucc

SEQ ID NO: 34518 - RNA, 22 nt, Artificial Sequence
  Guide RNA
acuaagaaccccuucaccuucc

SEQ ID NO: 34519 - RNA, 22 nt, Artificial Sequence
  Guide RNA
acugguggggaaggugaagggg

SEQ ID NO: 34520 - RNA, 22 nt, Artificial Sequence
  Guide RNA
acugguggggagggugaagggg

SEQ ID NO: 34521 - RNA, 22 nt, Artificial Sequence
  Guide RNA
agaaccccuucacccuccccac

SEQ ID NO: 34522 - RNA, 22 nt, Artificial Sequence
  Guide RNA
agaaccccuucaccuuccccac

SEQ ID NO: 34523 - RNA, 22 nt, Artificial Sequence
  Guide RNA
agaaggcacugguggggaaggu

SEQ ID NO: 34524 - RNA, 22 nt, Artificial Sequence
  Guide RNA
agaaggcacugguggggagggu

SEQ ID NO: 34525 - RNA, 22 nt, Artificial Sequence
  Guide RNA
agaauuacuaagaaccccuuca

SEQ ID NO: 34526 - RNA, 22 nt, Artificial Sequence
  Guide RNA
aggcacugguggggaaggugaa

SEQ ID NO: 34527 - RNA, 22 nt, Artificial Sequence
  Guide RNA
aggcacugguggggagggugaa

SEQ ID NO: 34528 - RNA, 22 nt, Artificial Sequence
  Guide RNA
agggugaagggguucuuaguaa

SEQ ID NO: 34529 - RNA, 22 nt, Artificial Sequence
  Guide RNA
auuacuaagaaccccuucaccc

SEQ ID NO: 34530 - RNA, 22 nt, Artificial Sequence
  Guide RNA
auuacuaagaaccccuucaccu

SEQ ID NO: 34531 - RNA, 22 nt, Artificial Sequence
  Guide RNA
cacccuccccaccagugccuuc

SEQ ID NO: 34532 - RNA, 22 nt, Artificial Sequence
  Guide RNA
caccuuccccaccagugccuuc

SEQ ID NO: 34533 - RNA, 22 nt, Artificial Sequence
  Guide RNA
cacugguggggaaggugaaggg

SEQ ID NO: 34534 - RNA, 22 nt, Artificial Sequence
  Guide RNA
cacugguggggagggugaaggg

SEQ ID NO: 34535 - RNA, 22 nt, Artificial Sequence
  Guide RNA
cagaaggcacugguggggaagg

SEQ ID NO: 34536 - RNA, 22 nt, Artificial Sequence
  Guide RNA
cagaaggcacugguggggaggg

SEQ ID NO: 34537 - RNA, 22 nt, Artificial Sequence
  Guide RNA
cagaauuacuaagaaccccuuc

SEQ ID NO: 34538 - RNA, 22 nt, Artificial Sequence
  Guide RNA
ccccuucacccuccccaccagu

SEQ ID NO: 34539 - RNA, 22 nt, Artificial Sequence
  Guide RNA
ccccuucaccuuccccaccagu

SEQ ID NO: 34540 - RNA, 22 nt, Artificial Sequence
  Guide RNA
cccuccccaccagugccuucug

SEQ ID NO: 34541 - RNA, 22 nt, Artificial Sequence
  Guide RNA
cccuucacccuccccaccagug

SEQ ID NO: 34542 - RNA, 22 nt, Artificial Sequence
  Guide RNA
cccuucaccuuccccaccagug

SEQ ID NO: 34543 - RNA, 22 nt, Artificial Sequence
  Guide RNA
ccuccccaccagugccuucugc

SEQ ID NO: 34544 - RNA, 22 nt, Artificial Sequence
  Guide RNA
ccuucacccuccccaccagugc

SEQ ID NO: 34545 - RNA, 22 nt, Artificial Sequence
  Guide RNA
ccuucaccuuccccaccagugc

SEQ ID NO: 34546 - RNA, 22 nt, Artificial Sequence
  Guide RNA
ccuuccccaccagugccuucug

SEQ ID NO: 34547 - RNA, 22 nt, Artificial Sequence
  Guide RNA
cuaagaaccccuucacccuccc

SEQ ID NO: 34548 - RNA, 22 nt, Artificial Sequence
  Guide RNA
cuaagaaccccuucaccuuccc

SEQ ID NO: 34549 - RNA, 22 nt, Artificial Sequence
  Guide RNA
cugggcagaaggcacugguggg

SEQ ID NO: 34550 - RNA, 22 nt, Artificial Sequence
  Guide RNA
cugguggggaaggugaaggggu

SEQ ID NO: 34551 - RNA, 22 nt, Artificial Sequence
  Guide RNA
cugguggggagggugaaggggu

SEQ ID NO: 34552 - RNA, 22 nt, Artificial Sequence
  Guide RNA
cuucacccuccccaccagugcc

SEQ ID NO: 34553 - RNA, 22 nt, Artificial Sequence
  Guide RNA
cuucaccuuccccaccagugcc

SEQ ID NO: 34554 - RNA, 22 nt, Artificial Sequence
  Guide RNA
cuuccccaccagugccuucugc

SEQ ID NO: 34555 - RNA, 22 nt, Artificial Sequence
  Guide RNA
gaaccccuucacccuccccacc

SEQ ID NO: 34556 - RNA, 22 nt, Artificial Sequence
  Guide RNA
gaaccccuucaccuuccccacc

SEQ ID NO: 34557 - RNA, 22 nt, Artificial Sequence
  Guide RNA
gaaggcacugguggggaaggug

SEQ ID NO: 34558 - RNA, 22 nt, Artificial Sequence
  Guide RNA
gaaggcacugguggggagggug

SEQ ID NO: 34559 - RNA, 22 nt, Artificial Sequence
  Guide RNA
gaaggugaagggguucuuagua

SEQ ID NO: 34560 - RNA, 22 nt, Artificial Sequence
  Guide RNA
gaauuacuaagaaccccuucac

SEQ ID NO: 34561 - RNA, 22 nt, Artificial Sequence
  Guide RNA
gagggugaagggguucuuagua

SEQ ID NO: 34562 - RNA, 22 nt, Artificial Sequence
  Guide RNA
gcacugguggggaaggugaagg

SEQ ID NO: 34563 - RNA, 22 nt, Artificial Sequence
  Guide RNA
gcacugguggggagggugaagg

SEQ ID NO: 34564 - RNA, 22 nt, Artificial Sequence
  Guide RNA
gcagaaggcacugguggggaag

SEQ ID NO: 34565 - RNA, 22 nt, Artificial Sequence
  Guide RNA
gcagaaggcacugguggggagg

SEQ ID NO: 34566 - RNA, 22 nt, Artificial Sequence
  Guide RNA
gcugggcagaaggcacuggugg

SEQ ID NO: 34567 - RNA, 22 nt, Artificial Sequence
  Guide RNA
ggaaggugaagggguucuuagu

SEQ ID NO: 34568 - RNA, 22 nt, Artificial Sequence
  Guide RNA
ggagggugaagggguucuuagu

SEQ ID NO: 34569 - RNA, 22 nt, Artificial Sequence
  Guide RNA
ggcacugguggggaaggugaag

SEQ ID NO: 34570 - RNA, 22 nt, Artificial Sequence
  Guide RNA
ggcacugguggggagggugaag

SEQ ID NO: 34571 - RNA, 22 nt, Artificial Sequence
  Guide RNA
ggcagaaggcacugguggggaa

SEQ ID NO: 34572 - RNA, 22 nt, Artificial Sequence
  Guide RNA
ggcagaaggcacugguggggag

SEQ ID NO: 34573 - RNA, 22 nt, Artificial Sequence
  Guide RNA
gggaaggugaagggguucuuag

SEQ ID NO: 34574 - RNA, 22 nt, Artificial Sequence
  Guide RNA
gggagggugaagggguucuuag

SEQ ID NO: 34575 - RNA, 22 nt, Artificial Sequence
  Guide RNA
gggcagaaggcacuggugggga

SEQ ID NO: 34576 - RNA, 22 nt, Artificial Sequence
  Guide RNA
ggggaaggugaagggguucuua

SEQ ID NO: 34577 - RNA, 22 nt, Artificial Sequence
  Guide RNA
ggggagggugaagggguucuua

SEQ ID NO: 34578 - RNA, 22 nt, Artificial Sequence
  Guide RNA
gguggggaaggugaagggguuc

SEQ ID NO: 34579 - RNA, 22 nt, Artificial Sequence
  Guide RNA
gguggggagggugaagggguuc

SEQ ID NO: 34580 - RNA, 22 nt, Artificial Sequence
  Guide RNA
guggggaaggugaagggguucu

SEQ ID NO: 34581 - RNA, 22 nt, Artificial Sequence
  Guide RNA
guggggagggugaagggguucu

SEQ ID NO: 34582 - RNA, 22 nt, Artificial Sequence
  Guide RNA
uaagaaccccuucacccucccc

SEQ ID NO: 34583 - RNA, 22 nt, Artificial Sequence
  Guide RNA
uaagaaccccuucaccuucccc

SEQ ID NO: 34584 - RNA, 22 nt, Artificial Sequence
  Guide RNA
uacuaagaaccccuucacccuc

SEQ ID NO: 34585 - RNA, 22 nt, Artificial Sequence
  Guide RNA
uacuaagaaccccuucaccuuc

SEQ ID NO: 34586 - RNA, 22 nt, Artificial Sequence
  Guide RNA
ucacccuccccaccagugccuu

SEQ ID NO: 34587 - RNA, 22 nt, Artificial Sequence
  Guide RNA
ucaccuuccccaccagugccuu

SEQ ID NO: 34588 - RNA, 22 nt, Artificial Sequence
  Guide RNA
ugggcagaaggcacuggugggg

SEQ ID NO: 34589 - RNA, 22 nt, Artificial Sequence
  Guide RNA
uggggaaggugaagggguucuu

SEQ ID NO: 34590 - RNA, 22 nt, Artificial Sequence
  Guide RNA
uggggagggugaagggguucuu

SEQ ID NO: 34591 - RNA, 22 nt, Artificial Sequence
  Guide RNA
ugguggggaaggugaagggguu

SEQ ID NO: 34592 - RNA, 22 nt, Artificial Sequence
  Guide RNA
ugguggggagggugaagggguu

SEQ ID NO: 34593 - RNA, 22 nt, Artificial Sequence
  Guide RNA
uuacuaagaaccccuucacccu

SEQ ID NO: 34594 - RNA, 22 nt, Artificial Sequence
  Guide RNA
uuacuaagaaccccuucaccuu

SEQ ID NO: 34595 - RNA, 22 nt, Artificial Sequence
  Guide RNA
uucacccuccccaccagugccu

SEQ ID NO: 34596 - RNA, 22 nt, Artificial Sequence
  Guide RNA
uucaccuuccccaccagugccu

SEQ ID NO: 34597 - RNA, 20 nt, Artificial Sequence
  Guide RNA
aacagcugggacacuacaca

SEQ ID NO: 34598 - RNA, 20 nt, Artificial Sequence
  Guide RNA
aacagcugggacacuacacc

SEQ ID NO: 34599 - RNA, 20 nt, Artificial Sequence
  Guide RNA
acacauagagagagggacca

SEQ ID NO: 34600 - RNA, 20 nt, Artificial Sequence
  Guide RNA
acaccuagagagagggacca

SEQ ID NO: 34601 - RNA, 20 nt, Artificial Sequence
  Guide RNA
acacuacacauagagagagg

SEQ ID NO: 34602 - RNA, 20 nt, Artificial Sequence
  Guide RNA
acacuacaccuagagagagg

SEQ ID NO: 34603 - RNA, 20 nt, Artificial Sequence
  Guide RNA
acagcugggacacuacacau

SEQ ID NO: 34604 - RNA, 20 nt, Artificial Sequence
  Guide RNA
acagcugggacacuacaccu

SEQ ID NO: 34605 - RNA, 20 nt, Artificial Sequence
  Guide RNA
acauagagagagggaccagg

SEQ ID NO: 34606 - RNA, 20 nt, Artificial Sequence
  Guide RNA
accuagagagagggaccagg

SEQ ID NO: 34607 - RNA, 20 nt, Artificial Sequence
  Guide RNA
acuacacauagagagaggga

SEQ ID NO: 34608 - RNA, 20 nt, Artificial Sequence
  Guide RNA
acuacaccuagagagaggga

SEQ ID NO: 34609 - RNA, 20 nt, Artificial Sequence
  Guide RNA
agcugggacacuacacauag

SEQ ID NO: 34610 - RNA, 20 nt, Artificial Sequence
  Guide RNA
agcugggacacuacaccuag

SEQ ID NO: 34611 - RNA, 20 nt, Artificial Sequence
  Guide RNA
agguguagugucccagcugu

SEQ ID NO: 34612 - RNA, 20 nt, Artificial Sequence
  Guide RNA
aguggccuggucccucucuc

SEQ ID NO: 34613 - RNA, 20 nt, Artificial Sequence
  Guide RNA
auguguagugucccagcugu

SEQ ID NO: 34614 - RNA, 20 nt, Artificial Sequence
  Guide RNA
cacauagagagagggaccag

SEQ ID NO: 34615 - RNA, 20 nt, Artificial Sequence
  Guide RNA
caccuagagagagggaccag

SEQ ID NO: 34616 - RNA, 20 nt, Artificial Sequence
  Guide RNA
cacuacacauagagagaggg

SEQ ID NO: 34617 - RNA, 20 nt, Artificial Sequence
  Guide RNA
cacuacaccuagagagaggg

SEQ ID NO: 34618 - RNA, 20 nt, Artificial Sequence
  Guide RNA
cagcugggacacuacacaua

SEQ ID NO: 34619 - RNA, 20 nt, Artificial Sequence
  Guide RNA
cagcugggacacuacaccua

SEQ ID NO: 34620 - RNA, 20 nt, Artificial Sequence
  Guide RNA
caguggccuggucccucucu

SEQ ID NO: 34621 - RNA, 20 nt, Artificial Sequence
  Guide RNA
cauagagagagggaccaggc

SEQ ID NO: 34622 - RNA, 20 nt, Artificial Sequence
  Guide RNA
cccucucucuagguguagug

SEQ ID NO: 34623 - RNA, 20 nt, Artificial Sequence
  Guide RNA
cccucucucuauguguagug

SEQ ID NO: 34624 - RNA, 20 nt, Artificial Sequence
  Guide RNA
ccuagagagagggaccaggc

SEQ ID NO: 34625 - RNA, 20 nt, Artificial Sequence
  Guide RNA
ccucucucuagguguagugu

SEQ ID NO: 34626 - RNA, 20 nt, Artificial Sequence
  Guide RNA
ccucucucuauguguagugu

SEQ ID NO: 34627 - RNA, 20 nt, Artificial Sequence
  Guide RNA
ccuggucccucucucuaggu

SEQ ID NO: 34628 - RNA, 20 nt, Artificial Sequence
  Guide RNA
ccuggucccucucucuaugu

SEQ ID NO: 34629 - RNA, 20 nt, Artificial Sequence
  Guide RNA
cuacacauagagagagggac

SEQ ID NO: 34630 - RNA, 20 nt, Artificial Sequence
  Guide RNA
cuacaccuagagagagggac

SEQ ID NO: 34631 - RNA, 20 nt, Artificial Sequence
  Guide RNA
cuagguguagugucccagcu

SEQ ID NO: 34632 - RNA, 20 nt, Artificial Sequence
  Guide RNA
cuauguguagugucccagcu

SEQ ID NO: 34633 - RNA, 20 nt, Artificial Sequence
  Guide RNA
cucuagguguagugucccag

SEQ ID NO: 34634 - RNA, 20 nt, Artificial Sequence
  Guide RNA
cucuauguguagugucccag

SEQ ID NO: 34635 - RNA, 20 nt, Artificial Sequence
  Guide RNA
cucucuagguguaguguccc

SEQ ID NO: 34636 - RNA, 20 nt, Artificial Sequence
  Guide RNA
cucucuauguguaguguccc

SEQ ID NO: 34637 - RNA, 20 nt, Artificial Sequence
  Guide RNA
cucucucuagguguaguguc

SEQ ID NO: 34638 - RNA, 20 nt, Artificial Sequence
  Guide RNA
cucucucuauguguaguguc

SEQ ID NO: 34639 - RNA, 20 nt, Artificial Sequence
  Guide RNA
cugggacacuacacauagag

SEQ ID NO: 34640 - RNA, 20 nt, Artificial Sequence
  Guide RNA
cugggacacuacaccuagag

SEQ ID NO: 34641 - RNA, 20 nt, Artificial Sequence
  Guide RNA
cuggucccucucucuaggug

SEQ ID NO: 34642 - RNA, 20 nt, Artificial Sequence
  Guide RNA
cuggucccucucucuaugug

SEQ ID NO: 34643 - RNA, 20 nt, Artificial Sequence
  Guide RNA
gacacuacacauagagagag

SEQ ID NO: 34644 - RNA, 20 nt, Artificial Sequence
  Guide RNA
gacacuacaccuagagagag

SEQ ID NO: 34645 - RNA, 20 nt, Artificial Sequence
  Guide RNA
gccuggucccucucucuagg

SEQ ID NO: 34646 - RNA, 20 nt, Artificial Sequence
  Guide RNA
gccuggucccucucucuaug

SEQ ID NO: 34647 - RNA, 20 nt, Artificial Sequence
  Guide RNA
gcugggacacuacacauaga

SEQ ID NO: 34648 - RNA, 20 nt, Artificial Sequence
  Guide RNA
gcugggacacuacaccuaga

SEQ ID NO: 34649 - RNA, 20 nt, Artificial Sequence
  Guide RNA
ggacacuacacauagagaga

SEQ ID NO: 34650 - RNA, 20 nt, Artificial Sequence
  Guide RNA
ggacacuacaccuagagaga

SEQ ID NO: 34651 - RNA, 20 nt, Artificial Sequence
  Guide RNA
ggccuggucccucucucuag

SEQ ID NO: 34652 - RNA, 20 nt, Artificial Sequence
  Guide RNA
ggccuggucccucucucuau

SEQ ID NO: 34653 - RNA, 20 nt, Artificial Sequence
  Guide RNA
gggacacuacacauagagag

SEQ ID NO: 34654 - RNA, 20 nt, Artificial Sequence
  Guide RNA
gggacacuacaccuagagag

SEQ ID NO: 34655 - RNA, 20 nt, Artificial Sequence
  Guide RNA
ggucccucucucuaggugua

SEQ ID NO: 34656 - RNA, 20 nt, Artificial Sequence
  Guide RNA
ggucccucucucuaugugua

SEQ ID NO: 34657 - RNA, 20 nt, Artificial Sequence
  Guide RNA
guaacagcugggacacuaca

SEQ ID NO: 34658 - RNA, 20 nt, Artificial Sequence
  Guide RNA
gucccucucucuagguguag

SEQ ID NO: 34659 - RNA, 20 nt, Artificial Sequence
  Guide RNA
gucccucucucuauguguag

SEQ ID NO: 34660 - RNA, 20 nt, Artificial Sequence
  Guide RNA
guggccuggucccucucucu

SEQ ID NO: 34661 - RNA, 20 nt, Artificial Sequence
  Guide RNA
uaacagcugggacacuacac

SEQ ID NO: 34662 - RNA, 20 nt, Artificial Sequence
  Guide RNA
uacacauagagagagggacc

SEQ ID NO: 34663 - RNA, 20 nt, Artificial Sequence
  Guide RNA
uacaccuagagagagggacc

SEQ ID NO: 34664 - RNA, 20 nt, Artificial Sequence
  Guide RNA
uagguguagugucccagcug

SEQ ID NO: 34665 - RNA, 20 nt, Artificial Sequence
  Guide RNA
uauguguagugucccagcug

SEQ ID NO: 34666 - RNA, 20 nt, Artificial Sequence
  Guide RNA
ucccucucucuagguguagu

SEQ ID NO: 34667 - RNA, 20 nt, Artificial Sequence
  Guide RNA
ucccucucucuauguguagu

SEQ ID NO: 34668 - RNA, 20 nt, Artificial Sequence
  Guide RNA
ucuagguguagugucccagc

SEQ ID NO: 34669 - RNA, 20 nt, Artificial Sequence
  Guide RNA
ucuauguguagugucccagc

SEQ ID NO: 34670 - RNA, 20 nt, Artificial Sequence
  Guide RNA
ucucuagguguaguguccca

SEQ ID NO: 34671 - RNA, 20 nt, Artificial Sequence
  Guide RNA
ucucuauguguaguguccca

SEQ ID NO: 34672 - RNA, 20 nt, Artificial Sequence
  Guide RNA
ucucucuagguguagugucc

SEQ ID NO: 34673 - RNA, 20 nt, Artificial Sequence
  Guide RNA
ucucucuauguguagugucc

SEQ ID NO: 34674 - RNA, 20 nt, Artificial Sequence
  Guide RNA
uggccuggucccucucucua

SEQ ID NO: 34675 - RNA, 20 nt, Artificial Sequence
  Guide RNA
ugggacacuacacauagaga

SEQ ID NO: 34676 - RNA, 20 nt, Artificial Sequence
  Guide RNA
ugggacacuacaccuagaga

SEQ ID NO: 34677 - RNA, 20 nt, Artificial Sequence
  Guide RNA
uggucccucucucuaggugu

SEQ ID NO: 34678 - RNA, 20 nt, Artificial Sequence
  Guide RNA
uggucccucucucuaugugu

SEQ ID NO: 34679 - RNA, 20 nt, Artificial Sequence
  Guide RNA
uguaacagcugggacacuac

SEQ ID NO: 34680 - RNA, 20 nt, Artificial Sequence
  Guide RNA
uuguaacagcugggacacua

SEQ ID NO: 34681 - RNA, 21 nt, Artificial Sequence
  Guide RNA
aacagcugggacacuacacau

SEQ ID NO: 34682 - RNA, 21 nt, Artificial Sequence
  Guide RNA
aacagcugggacacuacaccu

SEQ ID NO: 34683 - RNA, 21 nt, Artificial Sequence
  Guide RNA
acacauagagagagggaccag

SEQ ID NO: 34684 - RNA, 21 nt, Artificial Sequence
  Guide RNA
acaccuagagagagggaccag

SEQ ID NO: 34685 - RNA, 21 nt, Artificial Sequence
  Guide RNA
acacuacacauagagagaggg

SEQ ID NO: 34686 - RNA, 21 nt, Artificial Sequence
  Guide RNA
acacuacaccuagagagaggg

SEQ ID NO: 34687 - RNA, 21 nt, Artificial Sequence
  Guide RNA
acagcugggacacuacacaua

SEQ ID NO: 34688 - RNA, 21 nt, Artificial Sequence
  Guide RNA
acagcugggacacuacaccua

SEQ ID NO: 34689 - RNA, 21 nt, Artificial Sequence
  Guide RNA
acauagagagagggaccaggc

SEQ ID NO: 34690 - RNA, 21 nt, Artificial Sequence
  Guide RNA
accuagagagagggaccaggc

SEQ ID NO: 34691 - RNA, 21 nt, Artificial Sequence
  Guide RNA
acuacacauagagagagggac

SEQ ID NO: 34692 - RNA, 21 nt, Artificial Sequence
  Guide RNA
acuacaccuagagagagggac

SEQ ID NO: 34693 - RNA, 21 nt, Artificial Sequence
  Guide RNA
agcugggacacuacacauaga

SEQ ID NO: 34694 - RNA, 21 nt, Artificial Sequence
  Guide RNA
agcugggacacuacaccuaga

SEQ ID NO: 34695 - RNA, 21 nt, Artificial Sequence
  Guide RNA
agguguagugucccagcuguu

SEQ ID NO: 34696 - RNA, 21 nt, Artificial Sequence
  Guide RNA
aguggccuggucccucucucu

SEQ ID NO: 34697 - RNA, 21 nt, Artificial Sequence
  Guide RNA
auguguagugucccagcuguu

SEQ ID NO: 34698 - RNA, 21 nt, Artificial Sequence
  Guide RNA
cacauagagagagggaccagg

SEQ ID NO: 34699 - RNA, 21 nt, Artificial Sequence
  Guide RNA
caccuagagagagggaccagg

SEQ ID NO: 34700 - RNA, 21 nt, Artificial Sequence
  Guide RNA
cacuacacauagagagaggga

SEQ ID NO: 34701 - RNA, 21 nt, Artificial Sequence
  Guide RNA
cacuacaccuagagagaggga

SEQ ID NO: 34702 - RNA, 21 nt, Artificial Sequence
  Guide RNA
cagcugggacacuacacauag

SEQ ID NO: 34703 - RNA, 21 nt, Artificial Sequence
  Guide RNA
cagcugggacacuacaccuag

SEQ ID NO: 34704 - RNA, 21 nt, Artificial Sequence
  Guide RNA
caguggccuggucccucucuc

SEQ ID NO: 34705 - RNA, 21 nt, Artificial Sequence
  Guide RNA
cauagagagagggaccaggcc

SEQ ID NO: 34706 - RNA, 21 nt, Artificial Sequence
  Guide RNA
ccaguggccuggucccucucu

SEQ ID NO: 34707 - RNA, 21 nt, Artificial Sequence
  Guide RNA
cccucucucuagguguagugu

SEQ ID NO: 34708 - RNA, 21 nt, Artificial Sequence
  Guide RNA
cccucucucuauguguagugu

SEQ ID NO: 34709 - RNA, 21 nt, Artificial Sequence
  Guide RNA
ccuagagagagggaccaggcc

SEQ ID NO: 34710 - RNA, 21 nt, Artificial Sequence
  Guide RNA
ccucucucuagguguaguguc

SEQ ID NO: 34711 - RNA, 21 nt, Artificial Sequence
  Guide RNA
ccucucucuauguguaguguc

SEQ ID NO: 34712 - RNA, 21 nt, Artificial Sequence
  Guide RNA
ccuggucccucucucuaggug

SEQ ID NO: 34713 - RNA, 21 nt, Artificial Sequence
  Guide RNA
ccuggucccucucucuaugug

SEQ ID NO: 34714 - RNA, 21 nt, Artificial Sequence
  Guide RNA
cuacacauagagagagggacc

SEQ ID NO: 34715 - RNA, 21 nt, Artificial Sequence
  Guide RNA
cuacaccuagagagagggacc

SEQ ID NO: 34716 - RNA, 21 nt, Artificial Sequence
  Guide RNA
cuagguguagugucccagcug

SEQ ID NO: 34717 - RNA, 21 nt, Artificial Sequence
  Guide RNA
cuauguguagugucccagcug

SEQ ID NO: 34718 - RNA, 21 nt, Artificial Sequence
  Guide RNA
cucuagguguagugucccagc

SEQ ID NO: 34719 - RNA, 21 nt, Artificial Sequence
  Guide RNA
cucuauguguagugucccagc

SEQ ID NO: 34720 - RNA, 21 nt, Artificial Sequence
  Guide RNA
cucucuagguguaguguccca

SEQ ID NO: 34721 - RNA, 21 nt, Artificial Sequence
  Guide RNA
cucucuauguguaguguccca

SEQ ID NO: 34722 - RNA, 21 nt, Artificial Sequence
  Guide RNA
cucucucuagguguagugucc

SEQ ID NO: 34723 - RNA, 21 nt, Artificial Sequence
  Guide RNA
cucucucuauguguagugucc

SEQ ID NO: 34724 - RNA, 21 nt, Artificial Sequence
  Guide RNA
cugggacacuacacauagaga

SEQ ID NO: 34725 - RNA, 21 nt, Artificial Sequence
  Guide RNA
cugggacacuacaccuagaga

SEQ ID NO: 34726 - RNA, 21 nt, Artificial Sequence
  Guide RNA
cuggucccucucucuaggugu

SEQ ID NO: 34727 - RNA, 21 nt, Artificial Sequence
  Guide RNA
cuggucccucucucuaugugu

SEQ ID NO: 34728 - RNA, 21 nt, Artificial Sequence
  Guide RNA
gacacuacacauagagagagg

SEQ ID NO: 34729 - RNA, 21 nt, Artificial Sequence
  Guide RNA
gacacuacaccuagagagagg

SEQ ID NO: 34730 - RNA, 21 nt, Artificial Sequence
  Guide RNA
gccuggucccucucucuaggu

SEQ ID NO: 34731 - RNA, 21 nt, Artificial Sequence
  Guide RNA
gccuggucccucucucuaugu

SEQ ID NO: 34732 - RNA, 21 nt, Artificial Sequence
  Guide RNA
gcugggacacuacacauagag

SEQ ID NO: 34733 - RNA, 21 nt, Artificial Sequence
  Guide RNA
gcugggacacuacaccuagag

SEQ ID NO: 34734 - RNA, 21 nt, Artificial Sequence
  Guide RNA
ggacacuacacauagagagag

SEQ ID NO: 34735 - RNA, 21 nt, Artificial Sequence
  Guide RNA
ggacacuacaccuagagagag

SEQ ID NO: 34736 - RNA, 21 nt, Artificial Sequence
  Guide RNA
ggccuggucccucucucuagg

SEQ ID NO: 34737 - RNA, 21 nt, Artificial Sequence
  Guide RNA
ggccuggucccucucucuaug

SEQ ID NO: 34738 - RNA, 21 nt, Artificial Sequence
  Guide RNA
gggacacuacacauagagaga

SEQ ID NO: 34739 - RNA, 21 nt, Artificial Sequence
  Guide RNA
gggacacuacaccuagagaga

SEQ ID NO: 34740 - RNA, 21 nt, Artificial Sequence
  Guide RNA
ggucccucucucuagguguag

SEQ ID NO: 34741 - RNA, 21 nt, Artificial Sequence
  Guide RNA
ggucccucucucuauguguag

SEQ ID NO: 34742 - RNA, 21 nt, Artificial Sequence
  Guide RNA
guaacagcugggacacuacac

SEQ ID NO: 34743 - RNA, 21 nt, Artificial Sequence
  Guide RNA
gucccucucucuagguguagu

SEQ ID NO: 34744 - RNA, 21 nt, Artificial Sequence
  Guide RNA
gucccucucucuauguguagu

SEQ ID NO: 34745 - RNA, 21 nt, Artificial Sequence
  Guide RNA
guggccuggucccucucucua

SEQ ID NO: 34746 - RNA, 21 nt, Artificial Sequence
  Guide RNA
uaacagcugggacacuacaca

SEQ ID NO: 34747 - RNA, 21 nt, Artificial Sequence
  Guide RNA
uaacagcugggacacuacacc

SEQ ID NO: 34748 - RNA, 21 nt, Artificial Sequence
  Guide RNA
uacacauagagagagggacca

SEQ ID NO: 34749 - RNA, 21 nt, Artificial Sequence
  Guide RNA
uacaccuagagagagggacca

SEQ ID NO: 34750 - RNA, 21 nt, Artificial Sequence
  Guide RNA
uagguguagugucccagcugu

SEQ ID NO: 34751 - RNA, 21 nt, Artificial Sequence
  Guide RNA
uauguguagugucccagcugu

SEQ ID NO: 34752 - RNA, 21 nt, Artificial Sequence
  Guide RNA
ucccucucucuagguguagug

SEQ ID NO: 34753 - RNA, 21 nt, Artificial Sequence
  Guide RNA
ucccucucucuauguguagug

SEQ ID NO: 34754 - RNA, 21 nt, Artificial Sequence
  Guide RNA
ucuagguguagugucccagcu

SEQ ID NO: 34755 - RNA, 21 nt, Artificial Sequence
  Guide RNA
ucuauguguagugucccagcu

SEQ ID NO: 34756 - RNA, 21 nt, Artificial Sequence
  Guide RNA
ucucuagguguagugucccag

SEQ ID NO: 34757 - RNA, 21 nt, Artificial Sequence
  Guide RNA
ucucuauguguagugucccag

SEQ ID NO: 34758 - RNA, 21 nt, Artificial Sequence
  Guide RNA
ucucucuagguguaguguccc

SEQ ID NO: 34759 - RNA, 21 nt, Artificial Sequence
  Guide RNA
ucucucuauguguaguguccc

SEQ ID NO: 34760 - RNA, 21 nt, Artificial Sequence
  Guide RNA
uggccuggucccucucucuag

SEQ ID NO: 34761 - RNA, 21 nt, Artificial Sequence
  Guide RNA
uggccuggucccucucucuau

SEQ ID NO: 34762 - RNA, 21 nt, Artificial Sequence
  Guide RNA
ugggacacuacacauagagag

SEQ ID NO: 34763 - RNA, 21 nt, Artificial Sequence
  Guide RNA
ugggacacuacaccuagagag

SEQ ID NO: 34764 - RNA, 21 nt, Artificial Sequence
  Guide RNA
uggucccucucucuaggugua

SEQ ID NO: 34765 - RNA, 21 nt, Artificial Sequence
  Guide RNA
uggucccucucucuaugugua

SEQ ID NO: 34766 - RNA, 21 nt, Artificial Sequence
  Guide RNA
uguaacagcugggacacuaca

SEQ ID NO: 34767 - RNA, 21 nt, Artificial Sequence
  Guide RNA
uuguaacagcugggacacuac

SEQ ID NO: 34768 - RNA, 21 nt, Artificial Sequence
  Guide RNA
uuuguaacagcugggacacua

SEQ ID NO: 34769 - RNA, 22 nt, Artificial Sequence
  Guide RNA
aacagcugggacacuacacaua

SEQ ID NO: 34770 - RNA, 22 nt, Artificial Sequence
  Guide RNA
aacagcugggacacuacaccua

SEQ ID NO: 34771 - RNA, 22 nt, Artificial Sequence
  Guide RNA
acacauagagagagggaccagg

SEQ ID NO: 34772 - RNA, 22 nt, Artificial Sequence
  Guide RNA
acaccuagagagagggaccagg

SEQ ID NO: 34773 - RNA, 22 nt, Artificial Sequence
  Guide RNA
acacuacacauagagagaggga

SEQ ID NO: 34774 - RNA, 22 nt, Artificial Sequence
  Guide RNA
acacuacaccuagagagaggga

SEQ ID NO: 34775 - RNA, 22 nt, Artificial Sequence
  Guide RNA
acagcugggacacuacacauag

SEQ ID NO: 34776 - RNA, 22 nt, Artificial Sequence
  Guide RNA
acagcugggacacuacaccuag

SEQ ID NO: 34777 - RNA, 22 nt, Artificial Sequence
  Guide RNA
acauagagagagggaccaggcc

SEQ ID NO: 34778 - RNA, 22 nt, Artificial Sequence
  Guide RNA
accuagagagagggaccaggcc

SEQ ID NO: 34779 - RNA, 22 nt, Artificial Sequence
  Guide RNA
acuacacauagagagagggacc

SEQ ID NO: 34780 - RNA, 22 nt, Artificial Sequence
  Guide RNA
acuacaccuagagagagggacc

SEQ ID NO: 34781 - RNA, 22 nt, Artificial Sequence
  Guide RNA
agcugggacacuacacauagag

SEQ ID NO: 34782 - RNA, 22 nt, Artificial Sequence
  Guide RNA
agcugggacacuacaccuagag

SEQ ID NO: 34783 - RNA, 22 nt, Artificial Sequence
  Guide RNA
agguguagugucccagcuguua

SEQ ID NO: 34784 - RNA, 22 nt, Artificial Sequence
  Guide RNA
aguggccuggucccucucucua

SEQ ID NO: 34785 - RNA, 22 nt, Artificial Sequence
  Guide RNA
auguguagugucccagcuguua

SEQ ID NO: 34786 - RNA, 22 nt, Artificial Sequence
  Guide RNA
cacauagagagagggaccaggc

SEQ ID NO: 34787 - RNA, 22 nt, Artificial Sequence
  Guide RNA
caccuagagagagggaccaggc

SEQ ID NO: 34788 - RNA, 22 nt, Artificial Sequence
  Guide RNA
cacuacacauagagagagggac

SEQ ID NO: 34789 - RNA, 22 nt, Artificial Sequence
  Guide RNA
cacuacaccuagagagagggac

SEQ ID NO: 34790 - RNA, 22 nt, Artificial Sequence
  Guide RNA
cagcugggacacuacacauaga

SEQ ID NO: 34791 - RNA, 22 nt, Artificial Sequence
  Guide RNA
cagcugggacacuacaccuaga

SEQ ID NO: 34792 - RNA, 22 nt, Artificial Sequence
  Guide RNA
caguggccuggucccucucucu

SEQ ID NO: 34793 - RNA, 22 nt, Artificial Sequence
  Guide RNA
cauagagagagggaccaggcca

SEQ ID NO: 34794 - RNA, 22 nt, Artificial Sequence
  Guide RNA
ccaguggccuggucccucucuc

SEQ ID NO: 34795 - RNA, 22 nt, Artificial Sequence
  Guide RNA
cccucucucuagguguaguguc

SEQ ID NO: 34796 - RNA, 22 nt, Artificial Sequence
  Guide RNA
cccucucucuauguguaguguc

SEQ ID NO: 34797 - RNA, 22 nt, Artificial Sequence
  Guide RNA
ccuagagagagggaccaggcca

SEQ ID NO: 34798 - RNA, 22 nt, Artificial Sequence
  Guide RNA
ccucucucuagguguagugucc

SEQ ID NO: 34799 - RNA, 22 nt, Artificial Sequence
  Guide RNA
ccucucucuauguguagugucc

SEQ ID NO: 34800 - RNA, 22 nt, Artificial Sequence
  Guide RNA
ccuggucccucucucuaggugu

SEQ ID NO: 34801 - RNA, 22 nt, Artificial Sequence
  Guide RNA
ccuggucccucucucuaugugu

SEQ ID NO: 34802 - RNA, 22 nt, Artificial Sequence
  Guide RNA
cuacacauagagagagggacca

SEQ ID NO: 34803 - RNA, 22 nt, Artificial Sequence
  Guide RNA
cuacaccuagagagagggacca

SEQ ID NO: 34804 - RNA, 22 nt, Artificial Sequence
  Guide RNA
cuagguguagugucccagcugu

SEQ ID NO: 34805 - RNA, 22 nt, Artificial Sequence
  Guide RNA
cuauguguagugucccagcugu

SEQ ID NO: 34806 - RNA, 22 nt, Artificial Sequence
  Guide RNA
cucuagguguagugucccagcu

SEQ ID NO: 34807 - RNA, 22 nt, Artificial Sequence
  Guide RNA
cucuauguguagugucccagcu

SEQ ID NO: 34808 - RNA, 22 nt, Artificial Sequence
  Guide RNA
cucucuagguguagugucccag

SEQ ID NO: 34809 - RNA, 22 nt, Artificial Sequence
  Guide RNA
cucucuauguguagugucccag

SEQ ID NO: 34810 - RNA, 22 nt, Artificial Sequence
  Guide RNA
cucucucuagguguaguguccc

SEQ ID NO: 34811 - RNA, 22 nt, Artificial Sequence
  Guide RNA
cucucucuauguguaguguccc

SEQ ID NO: 34812 - RNA, 22 nt, Artificial Sequence
  Guide RNA
cugggacacuacacauagagag

SEQ ID NO: 34813 - RNA, 22 nt, Artificial Sequence
  Guide RNA
cugggacacuacaccuagagag

SEQ ID NO: 34814 - RNA, 22 nt, Artificial Sequence
  Guide RNA
cuggucccucucucuaggugua

SEQ ID NO: 34815 - RNA, 22 nt, Artificial Sequence
  Guide RNA
cuggucccucucucuaugugua

SEQ ID NO: 34816 - RNA, 22 nt, Artificial Sequence
  Guide RNA
cuuuguaacagcugggacacua

SEQ ID NO: 34817 - RNA, 22 nt, Artificial Sequence
  Guide RNA
gacacuacacauagagagaggg

SEQ ID NO: 34818 - RNA, 22 nt, Artificial Sequence
  Guide RNA
gacacuacaccuagagagaggg

SEQ ID NO: 34819 - RNA, 22 nt, Artificial Sequence
  Guide RNA
gccuggucccucucucuaggug

SEQ ID NO: 34820 - RNA, 22 nt, Artificial Sequence
  Guide RNA
gccuggucccucucucuaugug

SEQ ID NO: 34821 - RNA, 22 nt, Artificial Sequence
  Guide RNA
gcugggacacuacacauagaga

SEQ ID NO: 34822 - RNA, 22 nt, Artificial Sequence
  Guide RNA
gcugggacacuacaccuagaga

SEQ ID NO: 34823 - RNA, 22 nt, Artificial Sequence
  Guide RNA
ggacacuacacauagagagagg

SEQ ID NO: 34824 - RNA, 22 nt, Artificial Sequence
  Guide RNA
ggacacuacaccuagagagagg

SEQ ID NO: 34825 - RNA, 22 nt, Artificial Sequence
  Guide RNA
ggccuggucccucucucuaggu

SEQ ID NO: 34826 - RNA, 22 nt, Artificial Sequence
  Guide RNA
ggccuggucccucucucuaugu

SEQ ID NO: 34827 - RNA, 22 nt, Artificial Sequence
  Guide RNA
gggacacuacacauagagagag

SEQ ID NO: 34828 - RNA, 22 nt, Artificial Sequence
  Guide RNA
gggacacuacaccuagagagag

SEQ ID NO: 34829 - RNA, 22 nt, Artificial Sequence
  Guide RNA
ggucccucucucuagguguagu

SEQ ID NO: 34830 - RNA, 22 nt, Artificial Sequence
  Guide RNA
ggucccucucucuauguguagu

SEQ ID NO: 34831 - RNA, 22 nt, Artificial Sequence
  Guide RNA
guaacagcugggacacuacaca

SEQ ID NO: 34832 - RNA, 22 nt, Artificial Sequence
  Guide RNA
guaacagcugggacacuacacc

SEQ ID NO: 34833 - RNA, 22 nt, Artificial Sequence
  Guide RNA
gucccucucucuagguguagug

SEQ ID NO: 34834 - RNA, 22 nt, Artificial Sequence
  Guide RNA
gucccucucucuauguguagug

SEQ ID NO: 34835 - RNA, 22 nt, Artificial Sequence
  Guide RNA
guggccuggucccucucucuag

SEQ ID NO: 34836 - RNA, 22 nt, Artificial Sequence
  Guide RNA
guggccuggucccucucucuau

SEQ ID NO: 34837 - RNA, 22 nt, Artificial Sequence
  Guide RNA
uaacagcugggacacuacacau

SEQ ID NO: 34838 - RNA, 22 nt, Artificial Sequence
  Guide RNA
uaacagcugggacacuacaccu

SEQ ID NO: 34839 - RNA, 22 nt, Artificial Sequence
  Guide RNA
uacacauagagagagggaccag

SEQ ID NO: 34840 - RNA, 22 nt, Artificial Sequence
  Guide RNA
uacaccuagagagagggaccag

SEQ ID NO: 34841 - RNA, 22 nt, Artificial Sequence
  Guide RNA
uagguguagugucccagcuguu

SEQ ID NO: 34842 - RNA, 22 nt, Artificial Sequence
  Guide RNA
uauguguagugucccagcuguu

SEQ ID NO: 34843 - RNA, 22 nt, Artificial Sequence
  Guide RNA
uccaguggccuggucccucucu

SEQ ID NO: 34844 - RNA, 22 nt, Artificial Sequence
  Guide RNA
ucccucucucuagguguagugu

SEQ ID NO: 34845 - RNA, 22 nt, Artificial Sequence
  Guide RNA
ucccucucucuauguguagugu

SEQ ID NO: 34846 - RNA, 22 nt, Artificial Sequence
  Guide RNA
ucuagguguagugucccagcug

SEQ ID NO: 34847 - RNA, 22 nt, Artificial Sequence
  Guide RNA
ucuauguguagugucccagcug

SEQ ID NO: 34848 - RNA, 22 nt, Artificial Sequence
  Guide RNA
ucucuagguguagugucccagc

SEQ ID NO: 34849 - RNA, 22 nt, Artificial Sequence
  Guide RNA
ucucuauguguagugucccagc

SEQ ID NO: 34850 - RNA, 22 nt, Artificial Sequence
  Guide RNA
ucucucuagguguaguguccca

SEQ ID NO: 34851 - RNA, 22 nt, Artificial Sequence
  Guide RNA
ucucucuauguguaguguccca

SEQ ID NO: 34852 - RNA, 22 nt, Artificial Sequence
  Guide RNA
uggccuggucccucucucuagg

SEQ ID NO: 34853 - RNA, 22 nt, Artificial Sequence
  Guide RNA
uggccuggucccucucucuaug

SEQ ID NO: 34854 - RNA, 22 nt, Artificial Sequence
  Guide RNA
ugggacacuacacauagagaga

SEQ ID NO: 34855 - RNA, 22 nt, Artificial Sequence
  Guide RNA
ugggacacuacaccuagagaga

SEQ ID NO: 34856 - RNA, 22 nt, Artificial Sequence
  Guide RNA
uggucccucucucuagguguag

SEQ ID NO: 34857 - RNA, 22 nt, Artificial Sequence
  Guide RNA
uggucccucucucuauguguag

SEQ ID NO: 34858 - RNA, 22 nt, Artificial Sequence
  Guide RNA
uguaacagcugggacacuacac

SEQ ID NO: 34859 - RNA, 22 nt, Artificial Sequence
  Guide RNA
uuguaacagcugggacacuaca

SEQ ID NO: 34860 - RNA, 22 nt, Artificial Sequence
  Guide RNA
uuuguaacagcugggacacuac

SEQ ID NO: 34861 - RNA, 20 nt, Artificial Sequence
  Guide RNA
aaagcagucuacuguauaug

SEQ ID NO: 34862 - RNA, 20 nt, Artificial Sequence
  Guide RNA
aacuaaucacaaucuaagca

SEQ ID NO: 34863 - RNA, 20 nt, Artificial Sequence
  Guide RNA
aagcagucuacuguauaugu

SEQ ID NO: 34864 - RNA, 20 nt, Artificial Sequence
  Guide RNA
aagcauuguaacauauacag

SEQ ID NO: 34865 - RNA, 20 nt, Artificial Sequence
  Guide RNA
aaucacaaucuaagcauugu

SEQ ID NO: 34866 - RNA, 20 nt, Artificial Sequence
  Guide RNA
acaaucuaagcauuguaaca

SEQ ID NO: 34867 - RNA, 20 nt, Artificial Sequence
  Guide RNA
acaaugcuuagauugugauu

SEQ ID NO: 34868 - RNA, 20 nt, Artificial Sequence
  Guide RNA
acuaaucacaaucuaagcau

SEQ ID NO: 34869 - RNA, 20 nt, Artificial Sequence
  Guide RNA
acuguauauguuacaaugcu

SEQ ID NO: 34870 - RNA, 20 nt, Artificial Sequence
  Guide RNA
agcagucuacuguauauguu

SEQ ID NO: 34871 - RNA, 20 nt, Artificial Sequence
  Guide RNA
agcauuguaacauauacagu

SEQ ID NO: 34872 - RNA, 20 nt, Artificial Sequence
  Guide RNA
agucuacuguauauguuaca

SEQ ID NO: 34873 - RNA, 20 nt, Artificial Sequence
  Guide RNA
aucacaaucuaagcauugua

SEQ ID NO: 34874 - RNA, 20 nt, Artificial Sequence
  Guide RNA
auguuacaaugcuuagauug

SEQ ID NO: 34875 - RNA, 20 nt, Artificial Sequence
  Guide RNA
caaucuaagcauuguaacau

SEQ ID NO: 34876 - RNA, 20 nt, Artificial Sequence
  Guide RNA
cacaaucuaagcauuauaac

SEQ ID NO: 34877 - RNA, 20 nt, Artificial Sequence
  Guide RNA
cacaaucuaagcauuguaac

SEQ ID NO: 34878 - RNA, 20 nt, Artificial Sequence
  Guide RNA
cagucuacuguauauguuac

SEQ ID NO: 34879 - RNA, 20 nt, Artificial Sequence
  Guide RNA
cagucuacuguauauguuau

SEQ ID NO: 34880 - RNA, 20 nt, Artificial Sequence
  Guide RNA
cauuguaacauauacaguag

SEQ ID NO: 34881 - RNA, 20 nt, Artificial Sequence
  Guide RNA
cuaagcauuguaacauauac

SEQ ID NO: 34882 - RNA, 20 nt, Artificial Sequence
  Guide RNA
cuaaucacaaucuaagcauu

SEQ ID NO: 34883 - RNA, 20 nt, Artificial Sequence
  Guide RNA
cuacuguauauguuacaaug

SEQ ID NO: 34884 - RNA, 20 nt, Artificial Sequence
  Guide RNA
cuguauauguuacaaugcuu

SEQ ID NO: 34885 - RNA, 20 nt, Artificial Sequence
  Guide RNA
gaacuaaucacaaucuaagc

SEQ ID NO: 34886 - RNA, 20 nt, Artificial Sequence
  Guide RNA
gcagucuacuguauauguua

SEQ ID NO: 34887 - RNA, 20 nt, Artificial Sequence
  Guide RNA
gcauuguaacauauacagua

SEQ ID NO: 34888 - RNA, 20 nt, Artificial Sequence
  Guide RNA
guauauguuacaaugcuuag

SEQ ID NO: 34889 - RNA, 20 nt, Artificial Sequence
  Guide RNA
gucuacuguauauguuacaa

SEQ ID NO: 34890 - RNA, 20 nt, Artificial Sequence
  Guide RNA
guuacaaugcuuagauugug

SEQ ID NO: 34891 - RNA, 20 nt, Artificial Sequence
  Guide RNA
guuauaaugcuuagauugug

SEQ ID NO: 34892 - RNA, 20 nt, Artificial Sequence
  Guide RNA
uaaucacaaucuaagcauug

SEQ ID NO: 34893 - RNA, 20 nt, Artificial Sequence
  Guide RNA
uacaaugcuuagauugugau

SEQ ID NO: 34894 - RNA, 20 nt, Artificial Sequence
  Guide RNA
uacuguauauguuacaaugc

SEQ ID NO: 34895 - RNA, 20 nt, Artificial Sequence
  Guide RNA
ucacaaucuaagcauuguaa

SEQ ID NO: 34896 - RNA, 20 nt, Artificial Sequence
  Guide RNA
uguaacauauacaguagacu

SEQ ID NO: 34897 - RNA, 20 nt, Artificial Sequence
  Guide RNA
uguuacaaugcuuagauugu

SEQ ID NO: 34898 - RNA, 20 nt, Artificial Sequence
  Guide RNA
uuacaaugcuuagauuguga

SEQ ID NO: 34899 - RNA, 20 nt, Artificial Sequence
  Guide RNA
uuguaacauauacaguagac

SEQ ID NO: 34900 - RNA, 21 nt, Artificial Sequence
  Guide RNA
aaagcagucuacuguauaugu

SEQ ID NO: 34901 - RNA, 21 nt, Artificial Sequence
  Guide RNA
aagcagucuacuguauauguu

SEQ ID NO: 34902 - RNA, 21 nt, Artificial Sequence
  Guide RNA
agaacuaaucacaaucuaagc

SEQ ID NO: 34903 - RNA, 21 nt, Artificial Sequence
  Guide RNA
agcagucuacuguauauguua

SEQ ID NO: 34904 - RNA, 21 nt, Artificial Sequence
  Guide RNA
cacaaucuaagcauuguaaca

SEQ ID NO: 34905 - RNA, 21 nt, Artificial Sequence
  Guide RNA
cagucuacuguauauguuaca

SEQ ID NO: 34906 - RNA, 21 nt, Artificial Sequence
  Guide RNA
cuaaucacaaucuaagcauug

SEQ ID NO: 34907 - RNA, 21 nt, Artificial Sequence
  Guide RNA
cuacuguauauguuacaaugc

SEQ ID NO: 34908 - RNA, 21 nt, Artificial Sequence
  Guide RNA
gaacuaaucacaaucuaagca

SEQ ID NO: 34909 - RNA, 21 nt, Artificial Sequence
  Guide RNA
gcagucuacuguauauguuac

SEQ ID NO: 34910 - RNA, 21 nt, Artificial Sequence
  Guide RNA
gcagucuacuguauauguuau

SEQ ID NO: 34911 - RNA, 21 nt, Artificial Sequence
  Guide RNA
gcauuguaacauauacaguag

SEQ ID NO: 34912 - RNA, 21 nt, Artificial Sequence
  Guide RNA
guuacaaugcuuagauuguga

SEQ ID NO: 34913 - RNA, 21 nt, Artificial Sequence
  Guide RNA
uaaagcagucuacuguauaug

SEQ ID NO: 34914 - RNA, 21 nt, Artificial Sequence
  Guide RNA
ucacaaucuaagcauuguaac

SEQ ID NO: 34915 - RNA, 21 nt, Artificial Sequence
  Guide RNA
uguaacauauacaguagacug

SEQ ID NO: 34916 - RNA, 21 nt, Artificial Sequence
  Guide RNA
uguuacaaugcuuagauugug

SEQ ID NO: 34917 - RNA, 22 nt, Artificial Sequence
  Guide RNA
aaagcagucuacuguauauguu

SEQ ID NO: 34918 - RNA, 22 nt, Artificial Sequence
  Guide RNA
aagaacuaaucacaaucuaagc

SEQ ID NO: 34919 - RNA, 22 nt, Artificial Sequence
  Guide RNA
aagcagucuacuguauauguua

SEQ ID NO: 34920 - RNA, 22 nt, Artificial Sequence
  Guide RNA
acaaugcuuagauugugauuag

SEQ ID NO: 34921 - RNA, 22 nt, Artificial Sequence
  Guide RNA
acuaaucacaaucuaagcauug

SEQ ID NO: 34922 - RNA, 22 nt, Artificial Sequence
  Guide RNA
agaacuaaucacaaucuaagca

SEQ ID NO: 34923 - RNA, 22 nt, Artificial Sequence
  Guide RNA
agcagucuacuguauauguuac

SEQ ID NO: 34924 - RNA, 22 nt, Artificial Sequence
  Guide RNA
agcagucuacuguauauguuau

SEQ ID NO: 34925 - RNA, 22 nt, Artificial Sequence
  Guide RNA
agcauuguaacauauacaguag

SEQ ID NO: 34926 - RNA, 22 nt, Artificial Sequence
  Guide RNA
auaaagcagucuacuguauaug

SEQ ID NO: 34927 - RNA, 22 nt, Artificial Sequence
  Guide RNA
aucacaaucuaagcauuguaac

SEQ ID NO: 34928 - RNA, 22 nt, Artificial Sequence
  Guide RNA
auguuacaaugcuuagauugug

SEQ ID NO: 34929 - RNA, 22 nt, Artificial Sequence
  Guide RNA
cacaaucuaagcauuguaacau

SEQ ID NO: 34930 - RNA, 22 nt, Artificial Sequence
  Guide RNA
cagucuacuguauauguuacaa

SEQ ID NO: 34931 - RNA, 22 nt, Artificial Sequence
  Guide RNA
cauuguaacauauacaguagac

SEQ ID NO: 34932 - RNA, 22 nt, Artificial Sequence
  Guide RNA
cuaagcauuguaacauauacag

SEQ ID NO: 34933 - RNA, 22 nt, Artificial Sequence
  Guide RNA
cuaaucacaaucuaagcauugu

SEQ ID NO: 34934 - RNA, 22 nt, Artificial Sequence
  Guide RNA
cuacuguauauguuacaaugcu

SEQ ID NO: 34935 - RNA, 22 nt, Artificial Sequence
  Guide RNA
cuguauauguuacaaugcuuag

SEQ ID NO: 34936 - RNA, 22 nt, Artificial Sequence
  Guide RNA
gaacuaaucacaaucuaagcau

SEQ ID NO: 34937 - RNA, 22 nt, Artificial Sequence
  Guide RNA
gcagucuacuguauauguuaca

SEQ ID NO: 34938 - RNA, 22 nt, Artificial Sequence
  Guide RNA
gcagucuacuguauauguuaua

SEQ ID NO: 34939 - RNA, 22 nt, Artificial Sequence
  Guide RNA
gcauuguaacauauacaguaga

SEQ ID NO: 34940 - RNA, 22 nt, Artificial Sequence
  Guide RNA
gucuacuguauauguuacaaug

SEQ ID NO: 34941 - RNA, 22 nt, Artificial Sequence
  Guide RNA
guuacaaugcuuagauugugau

SEQ ID NO: 34942 - RNA, 22 nt, Artificial Sequence
  Guide RNA
uaaagcagucuacuguauaugu

SEQ ID NO: 34943 - RNA, 22 nt, Artificial Sequence
  Guide RNA
uauaacauauacaguagacugc

SEQ ID NO: 34944 - RNA, 22 nt, Artificial Sequence
  Guide RNA
ucacaaucuaagcauuguaaca

SEQ ID NO: 34945 - RNA, 22 nt, Artificial Sequence
  Guide RNA
ucuacuguauauguuacaaugc

SEQ ID NO: 34946 - RNA, 22 nt, Artificial Sequence
  Guide RNA
uguaacauauacaguagacugc

SEQ ID NO: 34947 - RNA, 22 nt, Artificial Sequence
  Guide RNA
uguuacaaugcuuagauuguga

SEQ ID NO: 34948 - RNA, 22 nt, Artificial Sequence
  Guide RNA
uuguaacauauacaguagacug

SEQ ID NO: 34949 - RNA, 20 nt, Artificial Sequence
  Guide RNA
acacacacacacacaccccc

SEQ ID NO: 34950 - RNA, 20 nt, Artificial Sequence
  Guide RNA
acacacacacacacccccuc

SEQ ID NO: 34951 - RNA, 20 nt, Artificial Sequence
  Guide RNA
acacacacacacccccucua

SEQ ID NO: 34952 - RNA, 20 nt, Artificial Sequence
  Guide RNA
acacacacacccccucuaua

SEQ ID NO: 34953 - RNA, 20 nt, Artificial Sequence
  Guide RNA
acacacacccccucuauaca

SEQ ID NO: 34954 - RNA, 20 nt, Artificial Sequence
  Guide RNA
acacacccccucuauacacc

SEQ ID NO: 34955 - RNA, 20 nt, Artificial Sequence
  Guide RNA
acacccccucuauacaccac

SEQ ID NO: 34956 - RNA, 20 nt, Artificial Sequence
  Guide RNA
acccccucuauacaccacua

SEQ ID NO: 34957 - RNA, 20 nt, Artificial Sequence
  Guide RNA
agugguguauagagggggug

SEQ ID NO: 34958 - RNA, 20 nt, Artificial Sequence
  Guide RNA
auagagggggugugugugug

SEQ ID NO: 34959 - RNA, 20 nt, Artificial Sequence
  Guide RNA
cacacacacacacacccccu

SEQ ID NO: 34960 - RNA, 20 nt, Artificial Sequence
  Guide RNA
cacacacacacacccccucu

SEQ ID NO: 34961 - RNA, 20 nt, Artificial Sequence
  Guide RNA
cacacacacacccccucuau

SEQ ID NO: 34962 - RNA, 20 nt, Artificial Sequence
  Guide RNA
cacacacacccccucuauac

SEQ ID NO: 34963 - RNA, 20 nt, Artificial Sequence
  Guide RNA
cacacacccccucuauacac

SEQ ID NO: 34964 - RNA, 20 nt, Artificial Sequence
  Guide RNA
cacacccccucuauacacca

SEQ ID NO: 34965 - RNA, 20 nt, Artificial Sequence
  Guide RNA
cacccccucuauacaccacu

SEQ ID NO: 34966 - RNA, 20 nt, Artificial Sequence
  Guide RNA
cccccucuauacaccacuaa

SEQ ID NO: 34967 - RNA, 20 nt, Artificial Sequence
  Guide RNA
gguguauagagggggugugu

SEQ ID NO: 34968 - RNA, 20 nt, Artificial Sequence
  Guide RNA
guauagagggggugugugug

SEQ ID NO: 34969 - RNA, 20 nt, Artificial Sequence
  Guide RNA
gugguguauagagggggugu

SEQ ID NO: 34970 - RNA, 20 nt, Artificial Sequence
  Guide RNA
guguauagagggggugugug

SEQ ID NO: 34971 - RNA, 20 nt, Artificial Sequence
  Guide RNA
uagagggggugugugugugu

SEQ ID NO: 34972 - RNA, 20 nt, Artificial Sequence
  Guide RNA
uagugguguauagagggggu

SEQ ID NO: 34973 - RNA, 20 nt, Artificial Sequence
  Guide RNA
uauagagggggugugugugu

SEQ ID NO: 34974 - RNA, 20 nt, Artificial Sequence
  Guide RNA
ugguguauagagggggugug

SEQ ID NO: 34975 - RNA, 20 nt, Artificial Sequence
  Guide RNA
uguauagagggggugugugu

SEQ ID NO: 34976 - RNA, 20 nt, Artificial Sequence
  Guide RNA
uuagugguguauagaggggg

SEQ ID NO: 34977 - RNA, 20 nt, Artificial Sequence
  Guide RNA
uuuagugguguauagagggg

SEQ ID NO: 34978 - RNA, 21 nt, Artificial Sequence
  Guide RNA
acacacacacacacacccccu

SEQ ID NO: 34979 - RNA, 21 nt, Artificial Sequence
  Guide RNA
acacacacacacacccccucu

SEQ ID NO: 34980 - RNA, 21 nt, Artificial Sequence
  Guide RNA
acacacacacacccccucuau

SEQ ID NO: 34981 - RNA, 21 nt, Artificial Sequence
  Guide RNA
acacacacacccccucuauac

SEQ ID NO: 34982 - RNA, 21 nt, Artificial Sequence
  Guide RNA
acacacacccccucuauacac

SEQ ID NO: 34983 - RNA, 21 nt, Artificial Sequence
  Guide RNA
acacacccccucuauacacca

SEQ ID NO: 34984 - RNA, 21 nt, Artificial Sequence
  Guide RNA
acacccccucuauacaccacu

SEQ ID NO: 34985 - RNA, 21 nt, Artificial Sequence
  Guide RNA
acccccucuauacaccacuaa

SEQ ID NO: 34986 - RNA, 21 nt, Artificial Sequence
  Guide RNA
agugguguauagagggggugu

SEQ ID NO: 34987 - RNA, 21 nt, Artificial Sequence
  Guide RNA
auagagggggugugugugugu

SEQ ID NO: 34988 - RNA, 21 nt, Artificial Sequence
  Guide RNA
cacacacacacacacaccccc

SEQ ID NO: 34989 - RNA, 21 nt, Artificial Sequence
  Guide RNA
cacacacacacacacccccuc

SEQ ID NO: 34990 - RNA, 21 nt, Artificial Sequence
  Guide RNA
cacacacacacacccccucua

SEQ ID NO: 34991 - RNA, 21 nt, Artificial Sequence
  Guide RNA
cacacacacacccccucuaua

SEQ ID NO: 34992 - RNA, 21 nt, Artificial Sequence
  Guide RNA
cacacacacccccucuauaca

SEQ ID NO: 34993 - RNA, 21 nt, Artificial Sequence
  Guide RNA
cacacacccccucuauacacc

SEQ ID NO: 34994 - RNA, 21 nt, Artificial Sequence
  Guide RNA
cacacccccucuauacaccac

SEQ ID NO: 34995 - RNA, 21 nt, Artificial Sequence
  Guide RNA
cacccccucuauacaccacua

SEQ ID NO: 34996 - RNA, 21 nt, Artificial Sequence
  Guide RNA
cccccucuauacaccacuaaa

SEQ ID NO: 34997 - RNA, 21 nt, Artificial Sequence
  Guide RNA
cuuuagugguguauagagggg

SEQ ID NO: 34998 - RNA, 21 nt, Artificial Sequence
  Guide RNA
gguguauagagggggugugug

SEQ ID NO: 34999 - RNA, 21 nt, Artificial Sequence
  Guide RNA
guauagagggggugugugugu

SEQ ID NO: 35000 - RNA, 21 nt, Artificial Sequence
  Guide RNA
gugguguauagagggggugug

SEQ ID NO: 35001 - RNA, 21 nt, Artificial Sequence
  Guide RNA
guguauagagggggugugugu

SEQ ID NO: 35002 - RNA, 21 nt, Artificial Sequence
  Guide RNA
uagagggggugugugugugug

SEQ ID NO: 35003 - RNA, 21 nt, Artificial Sequence
  Guide RNA
uagugguguauagagggggug

SEQ ID NO: 35004 - RNA, 21 nt, Artificial Sequence
  Guide RNA
uauagagggggugugugugug

SEQ ID NO: 35005 - RNA, 21 nt, Artificial Sequence
  Guide RNA
ugguguauagagggggugugu

SEQ ID NO: 35006 - RNA, 21 nt, Artificial Sequence
  Guide RNA
uguauagagggggugugugug

SEQ ID NO: 35007 - RNA, 21 nt, Artificial Sequence
  Guide RNA
uuagugguguauagagggggu

SEQ ID NO: 35008 - RNA, 21 nt, Artificial Sequence
  Guide RNA
uuuagugguguauagaggggg

SEQ ID NO: 35009 - RNA, 22 nt, Artificial Sequence
  Guide RNA
acacacacacacacacaccccc

SEQ ID NO: 35010 - RNA, 22 nt, Artificial Sequence
  Guide RNA
acacacacacacacacccccuc

SEQ ID NO: 35011 - RNA, 22 nt, Artificial Sequence
  Guide RNA
acacacacacacacccccucua

SEQ ID NO: 35012 - RNA, 22 nt, Artificial Sequence
  Guide RNA
acacacacacacccccucuaua

SEQ ID NO: 35013 - RNA, 22 nt, Artificial Sequence
  Guide RNA
acacacacacccccucuauaca

SEQ ID NO: 35014 - RNA, 22 nt, Artificial Sequence
  Guide RNA
acacacacccccucuauacacc

SEQ ID NO: 35015 - RNA, 22 nt, Artificial Sequence
  Guide RNA
acacacccccucuauacaccac

SEQ ID NO: 35016 - RNA, 22 nt, Artificial Sequence
  Guide RNA
acacccccucuauacaccacua

SEQ ID NO: 35017 - RNA, 22 nt, Artificial Sequence
  Guide RNA
acccccucuauacaccacuaaa

SEQ ID NO: 35018 - RNA, 22 nt, Artificial Sequence
  Guide RNA
agugguguauagagggggugug

SEQ ID NO: 35019 - RNA, 22 nt, Artificial Sequence
  Guide RNA
auagagggggugugugugugug

SEQ ID NO: 35020 - RNA, 22 nt, Artificial Sequence
  Guide RNA
cacacacacacacacacccccu

SEQ ID NO: 35021 - RNA, 22 nt, Artificial Sequence
  Guide RNA
cacacacacacacacccccucu

SEQ ID NO: 35022 - RNA, 22 nt, Artificial Sequence
  Guide RNA
cacacacacacacccccucuau

SEQ ID NO: 35023 - RNA, 22 nt, Artificial Sequence
  Guide RNA
cacacacacacccccucuauac

SEQ ID NO: 35024 - RNA, 22 nt, Artificial Sequence
  Guide RNA
cacacacacccccucuauacac

SEQ ID NO: 35025 - RNA, 22 nt, Artificial Sequence
  Guide RNA
cacacacccccucuauacacca

SEQ ID NO: 35026 - RNA, 22 nt, Artificial Sequence
  Guide RNA
cacacccccucuauacaccacu

SEQ ID NO: 35027 - RNA, 22 nt, Artificial Sequence
  Guide RNA
cacccccucuauacaccacuaa

SEQ ID NO: 35028 - RNA, 22 nt, Artificial Sequence
  Guide RNA
cccccucuauacaccacuaaag

SEQ ID NO: 35029 - RNA, 22 nt, Artificial Sequence
  Guide RNA
cuuuagugguguauagaggggg

SEQ ID NO: 35030 - RNA, 22 nt, Artificial Sequence
  Guide RNA
gcuuuagugguguauagagggg

SEQ ID NO: 35031 - RNA, 22 nt, Artificial Sequence
  Guide RNA
gguguauagagggggugugugu

SEQ ID NO: 35032 - RNA, 22 nt, Artificial Sequence
  Guide RNA
guauagagggggugugugugug

SEQ ID NO: 35033 - RNA, 22 nt, Artificial Sequence
  Guide RNA
gugguguauagagggggugugu

SEQ ID NO: 35034 - RNA, 22 nt, Artificial Sequence
  Guide RNA
guguauagagggggugugugug

SEQ ID NO: 35035 - RNA, 22 nt, Artificial Sequence
  Guide RNA
uagagggggugugugugugugu

SEQ ID NO: 35036 - RNA, 22 nt, Artificial Sequence
  Guide RNA
uagugguguauagagggggugu

SEQ ID NO: 35037 - RNA, 22 nt, Artificial Sequence
  Guide RNA
uauagagggggugugugugugu

SEQ ID NO: 35038 - RNA, 22 nt, Artificial Sequence
  Guide RNA
ugguguauagagggggugugug

SEQ ID NO: 35039 - RNA, 22 nt, Artificial Sequence
  Guide RNA
uguauagagggggugugugugu

SEQ ID NO: 35040 - RNA, 22 nt, Artificial Sequence
  Guide RNA
uuagugguguauagagggggug

SEQ ID NO: 35041 - RNA, 22 nt, Artificial Sequence
  Guide RNA
uuuagugguguauagagggggu

SEQ ID NO: 35042 - RNA, 20 nt, Artificial Sequence
  Guide RNA
gucaucaauacauacauaca

SEQ ID NO: 35043 - RNA, 20 nt, Artificial Sequence
  Guide RNA
ugucaucaauacauacauac

SEQ ID NO: 35044 - RNA, 21 nt, Artificial Sequence
  Guide RNA
cugucaucaauacauacauac

SEQ ID NO: 35045 - RNA, 22 nt, Artificial Sequence
  Guide RNA
cugucaucaauacauacauaca

SEQ ID NO: 35046 - RNA, 22 nt, Artificial Sequence
  Guide RNA
ucugucaucaauacauacauac

SEQ ID NO: 35047 - RNA, 20 nt, Artificial Sequence
  Guide RNA
aacaacuaacauucauguac

SEQ ID NO: 35048 - RNA, 20 nt, Artificial Sequence
  Guide RNA
aacuaacauucauguacuug

SEQ ID NO: 35049 - RNA, 20 nt, Artificial Sequence
  Guide RNA
aaguacaugaauguuaguug

SEQ ID NO: 35050 - RNA, 20 nt, Artificial Sequence
  Guide RNA
aauuugcuguaugugauaac

SEQ ID NO: 35051 - RNA, 20 nt, Artificial Sequence
  Guide RNA
acaacuaacauucauguacu

SEQ ID NO: 35052 - RNA, 20 nt, Artificial Sequence
  Guide RNA
acaugaauguuaguuaucac

SEQ ID NO: 35053 - RNA, 20 nt, Artificial Sequence
  Guide RNA
acuaacauucauguacuuga

SEQ ID NO: 35054 - RNA, 20 nt, Artificial Sequence
  Guide RNA
agcucaaguacaugaauguu

SEQ ID NO: 35055 - RNA, 20 nt, Artificial Sequence
  Guide RNA
aggaauuugcuguaugugau

SEQ ID NO: 35056 - RNA, 20 nt, Artificial Sequence
  Guide RNA
aguacaugaauguuaguugu

SEQ ID NO: 35057 - RNA, 20 nt, Artificial Sequence
  Guide RNA
augagcucaaguacaugaau

SEQ ID NO: 35058 - RNA, 20 nt, Artificial Sequence
  Guide RNA
auguuaguuaucacauacag

SEQ ID NO: 35059 - RNA, 20 nt, Artificial Sequence
  Guide RNA
auuugcuguaugugauaaca

SEQ ID NO: 35060 - RNA, 20 nt, Artificial Sequence
  Guide RNA
auuugcuguaugugauaacu

SEQ ID NO: 35061 - RNA, 20 nt, Artificial Sequence
  Guide RNA
caacuaacauucauguacuu

SEQ ID NO: 35062 - RNA, 20 nt, Artificial Sequence
  Guide RNA
caaguacaugaauguuaguu

SEQ ID NO: 35063 - RNA, 20 nt, Artificial Sequence
  Guide RNA
caugaauguuaguuaucaca

SEQ ID NO: 35064 - RNA, 20 nt, Artificial Sequence
  Guide RNA
caugaauguuaguuguuauc

SEQ ID NO: 35065 - RNA, 20 nt, Artificial Sequence
  Guide RNA
cuaacauucauguacuugag

SEQ ID NO: 35066 - RNA, 20 nt, Artificial Sequence
  Guide RNA
cucaaguacaugaauguuag

SEQ ID NO: 35067 - RNA, 20 nt, Artificial Sequence
  Guide RNA
cuguaugugauaacaacuaa

SEQ ID NO: 35068 - RNA, 20 nt, Artificial Sequence
  Guide RNA
cuguaugugauaacuaacau

SEQ ID NO: 35069 - RNA, 20 nt, Artificial Sequence
  Guide RNA
gaauguuaguuaucacauac

SEQ ID NO: 35070 - RNA, 20 nt, Artificial Sequence
  Guide RNA
gaauguuaguuguuaucaca

SEQ ID NO: 35071 - RNA, 20 nt, Artificial Sequence
  Guide RNA
gaauuugcuguaugugauaa

SEQ ID NO: 35072 - RNA, 20 nt, Artificial Sequence
  Guide RNA
gagcucaaguacaugaaugu

SEQ ID NO: 35073 - RNA, 20 nt, Artificial Sequence
  Guide RNA
gauaacaacuaacauucaug

SEQ ID NO: 35074 - RNA, 20 nt, Artificial Sequence
  Guide RNA
gauaacuaacauucauguac

SEQ ID NO: 35075 - RNA, 20 nt, Artificial Sequence
  Guide RNA
gcucaaguacaugaauguua

SEQ ID NO: 35076 - RNA, 20 nt, Artificial Sequence
  Guide RNA
gcuguaugugauaacaacua

SEQ ID NO: 35077 - RNA, 20 nt, Artificial Sequence
  Guide RNA
gcuguaugugauaacuaaca

SEQ ID NO: 35078 - RNA, 20 nt, Artificial Sequence
  Guide RNA
ggaauuugcuguaugugaua

SEQ ID NO: 35079 - RNA, 20 nt, Artificial Sequence
  Guide RNA
guacaugaauguuaguuauc

SEQ ID NO: 35080 - RNA, 20 nt, Artificial Sequence
  Guide RNA
guacaugaauguuaguuguu

SEQ ID NO: 35081 - RNA, 20 nt, Artificial Sequence
  Guide RNA
guaugugauaacaacuaaca

SEQ ID NO: 35082 - RNA, 20 nt, Artificial Sequence
  Guide RNA
guaugugauaacuaacauuc

SEQ ID NO: 35083 - RNA, 20 nt, Artificial Sequence
  Guide RNA
gugauaacaacuaacauuca

SEQ ID NO: 35084 - RNA, 20 nt, Artificial Sequence
  Guide RNA
gugauaacuaacauucaugu

SEQ ID NO: 35085 - RNA, 20 nt, Artificial Sequence
  Guide RNA
guuaguuaucacauacagca

SEQ ID NO: 35086 - RNA, 20 nt, Artificial Sequence
  Guide RNA
guuaguuguuaucacauaca

SEQ ID NO: 35087 - RNA, 20 nt, Artificial Sequence
  Guide RNA
uaguuaucacauacagcaaa

SEQ ID NO: 35088 - RNA, 20 nt, Artificial Sequence
  Guide RNA
uaguuguuaucacauacagc

SEQ ID NO: 35089 - RNA, 20 nt, Artificial Sequence
  Guide RNA
ucaaguacaugaauguuagu

SEQ ID NO: 35090 - RNA, 20 nt, Artificial Sequence
  Guide RNA
ugaauguuaguuguuaucac

SEQ ID NO: 35091 - RNA, 20 nt, Artificial Sequence
  Guide RNA
ugagcucaaguacaugaaug

SEQ ID NO: 35092 - RNA, 20 nt, Artificial Sequence
  Guide RNA
ugcuguaugugauaacaacu

SEQ ID NO: 35093 - RNA, 20 nt, Artificial Sequence
  Guide RNA
ugcuguaugugauaacuaac

SEQ ID NO: 35094 - RNA, 20 nt, Artificial Sequence
  Guide RNA
uguaugugauaacaacuaac

SEQ ID NO: 35095 - RNA, 20 nt, Artificial Sequence
  Guide RNA
ugugauaacaacuaacauuc

SEQ ID NO: 35096 - RNA, 20 nt, Artificial Sequence
  Guide RNA
ugugauaacuaacauucaug

SEQ ID NO: 35097 - RNA, 20 nt, Artificial Sequence
  Guide RNA
uguuaguuaucacauacagc

SEQ ID NO: 35098 - RNA, 20 nt, Artificial Sequence
  Guide RNA
uguuaguuguuaucacauac

SEQ ID NO: 35099 - RNA, 20 nt, Artificial Sequence
  Guide RNA
uuaguuaucacauacagcaa

SEQ ID NO: 35100 - RNA, 20 nt, Artificial Sequence
  Guide RNA
uuaguuguuaucacauacag

SEQ ID NO: 35101 - RNA, 20 nt, Artificial Sequence
  Guide RNA
uugcuguaugugauaacaac

SEQ ID NO: 35102 - RNA, 20 nt, Artificial Sequence
  Guide RNA
uugcuguaugugauaacuaa

SEQ ID NO: 35103 - RNA, 20 nt, Artificial Sequence
  Guide RNA
uuugcuguaugugauaacaa

SEQ ID NO: 35104 - RNA, 20 nt, Artificial Sequence
  Guide RNA
uuugcuguaugugauaacua

SEQ ID NO: 35105 - RNA, 21 nt, Artificial Sequence
  Guide RNA
aaggaauuugcuguaugugau

SEQ ID NO: 35106 - RNA, 21 nt, Artificial Sequence
  Guide RNA
aaugagcucaaguacaugaau

SEQ ID NO: 35107 - RNA, 21 nt, Artificial Sequence
  Guide RNA
acuaacauucauguacuugag

SEQ ID NO: 35108 - RNA, 21 nt, Artificial Sequence
  Guide RNA
agcucaaguacaugaauguua

SEQ ID NO: 35109 - RNA, 21 nt, Artificial Sequence
  Guide RNA
aggaauuugcuguaugugaua

SEQ ID NO: 35110 - RNA, 21 nt, Artificial Sequence
  Guide RNA
augagcucaaguacaugaaug

SEQ ID NO: 35111 - RNA, 21 nt, Artificial Sequence
  Guide RNA
auguuaguuaucacauacagc

SEQ ID NO: 35112 - RNA, 21 nt, Artificial Sequence
  Guide RNA
caacuaacauucauguacuug

SEQ ID NO: 35113 - RNA, 21 nt, Artificial Sequence
  Guide RNA
caaguacaugaauguuaguug

SEQ ID NO: 35114 - RNA, 21 nt, Artificial Sequence
  Guide RNA
cuaacauucauguacuugagc

SEQ ID NO: 35115 - RNA, 21 nt, Artificial Sequence
  Guide RNA
cucaaguacaugaauguuagu

SEQ ID NO: 35116 - RNA, 21 nt, Artificial Sequence
  Guide RNA
cuguaugugauaacaacuaac

SEQ ID NO: 35117 - RNA, 21 nt, Artificial Sequence
  Guide RNA
gaauuugcuguaugugauaac

SEQ ID NO: 35118 - RNA, 21 nt, Artificial Sequence
  Guide RNA
gagcucaaguacaugaauguu

SEQ ID NO: 35119 - RNA, 21 nt, Artificial Sequence
  Guide RNA
gcucaaguacaugaauguuag

SEQ ID NO: 35120 - RNA, 21 nt, Artificial Sequence
  Guide RNA
gcuguaugugauaacaacuaa

SEQ ID NO: 35121 - RNA, 21 nt, Artificial Sequence
  Guide RNA
gcuguaugugauaacuaacau

SEQ ID NO: 35122 - RNA, 21 nt, Artificial Sequence
  Guide RNA
ggaauuugcuguaugugauaa

SEQ ID NO: 35123 - RNA, 21 nt, Artificial Sequence
  Guide RNA
guuaguuaucacauacagcaa

SEQ ID NO: 35124 - RNA, 21 nt, Artificial Sequence
  Guide RNA
guuaguuguuaucacauacag

SEQ ID NO: 35125 - RNA, 21 nt, Artificial Sequence
  Guide RNA
uaguuguuaucacauacagca

SEQ ID NO: 35126 - RNA, 21 nt, Artificial Sequence
  Guide RNA
ugagcucaaguacaugaaugu

SEQ ID NO: 35127 - RNA, 21 nt, Artificial Sequence
  Guide RNA
ugcuguaugugauaacaacua

SEQ ID NO: 35128 - RNA, 21 nt, Artificial Sequence
  Guide RNA
ugcuguaugugauaacuaaca

SEQ ID NO: 35129 - RNA, 21 nt, Artificial Sequence
  Guide RNA
uguuaguuaucacauacagca

SEQ ID NO: 35130 - RNA, 21 nt, Artificial Sequence
  Guide RNA
uuaguuguuaucacauacagc

SEQ ID NO: 35131 - RNA, 21 nt, Artificial Sequence
  Guide RNA
uugcuguaugugauaacaacu

SEQ ID NO: 35132 - RNA, 21 nt, Artificial Sequence
  Guide RNA
uugcuguaugugauaacuaac

SEQ ID NO: 35133 - RNA, 21 nt, Artificial Sequence
  Guide RNA
uuugcuguaugugauaacaac

SEQ ID NO: 35134 - RNA, 22 nt, Artificial Sequence
  Guide RNA
aaaggaauuugcuguaugugau

SEQ ID NO: 35135 - RNA, 22 nt, Artificial Sequence
  Guide RNA
aaaugagcucaaguacaugaau

SEQ ID NO: 35136 - RNA, 22 nt, Artificial Sequence
  Guide RNA
aacuaacauucauguacuugag

SEQ ID NO: 35137 - RNA, 22 nt, Artificial Sequence
  Guide RNA
aaggaauuugcuguaugugaua

SEQ ID NO: 35138 - RNA, 22 nt, Artificial Sequence
  Guide RNA
aaugagcucaaguacaugaaug

SEQ ID NO: 35139 - RNA, 22 nt, Artificial Sequence
  Guide RNA
aauguuaguuaucacauacagc

SEQ ID NO: 35140 - RNA, 22 nt, Artificial Sequence
  Guide RNA
acaacuaacauucauguacuug

SEQ ID NO: 35141 - RNA, 22 nt, Artificial Sequence
  Guide RNA
acuaacauucauguacuugagc

SEQ ID NO: 35142 - RNA, 22 nt, Artificial Sequence
  Guide RNA
agcucaaguacaugaauguuag

SEQ ID NO: 35143 - RNA, 22 nt, Artificial Sequence
  Guide RNA
aggaauuugcuguaugugauaa

SEQ ID NO: 35144 - RNA, 22 nt, Artificial Sequence
  Guide RNA
augagcucaaguacaugaaugu

SEQ ID NO: 35145 - RNA, 22 nt, Artificial Sequence
  Guide RNA
auguuaguuaucacauacagca

SEQ ID NO: 35146 - RNA, 22 nt, Artificial Sequence
  Guide RNA
auuugcuguaugugauaacaac

SEQ ID NO: 35147 - RNA, 22 nt, Artificial Sequence
  Guide RNA
caacuaacauucauguacuuga

SEQ ID NO: 35148 - RNA, 22 nt, Artificial Sequence
  Guide RNA
caaguacaugaauguuaguugu

SEQ ID NO: 35149 - RNA, 22 nt, Artificial Sequence
  Guide RNA
caugaauguuaguuguuaucac

SEQ ID NO: 35150 - RNA, 22 nt, Artificial Sequence
  Guide RNA
cuaacauucauguacuugagcu

SEQ ID NO: 35151 - RNA, 22 nt, Artificial Sequence
  Guide RNA
cucaaguacaugaauguuaguu

SEQ ID NO: 35152 - RNA, 22 nt, Artificial Sequence
  Guide RNA
cuguaugugauaacaacuaaca

SEQ ID NO: 35153 - RNA, 22 nt, Artificial Sequence
  Guide RNA
cuguaugugauaacuaacauuc

SEQ ID NO: 35154 - RNA, 22 nt, Artificial Sequence
  Guide RNA
gaauguuaguuaucacauacag

SEQ ID NO: 35155 - RNA, 22 nt, Artificial Sequence
  Guide RNA
gaauuugcuguaugugauaaca

SEQ ID NO: 35156 - RNA, 22 nt, Artificial Sequence
  Guide RNA
gaauuugcuguaugugauaacu

SEQ ID NO: 35157 - RNA, 22 nt, Artificial Sequence
  Guide RNA
gagcucaaguacaugaauguua

SEQ ID NO: 35158 - RNA, 22 nt, Artificial Sequence
  Guide RNA
gcucaaguacaugaauguuagu

SEQ ID NO: 35159 - RNA, 22 nt, Artificial Sequence
  Guide RNA
gcuguaugugauaacaacuaac

SEQ ID NO: 35160 - RNA, 22 nt, Artificial Sequence
  Guide RNA
gcuguaugugauaacuaacauu

SEQ ID NO: 35161 - RNA, 22 nt, Artificial Sequence
  Guide RNA
ggaauuugcuguaugugauaac

SEQ ID NO: 35162 - RNA, 22 nt, Artificial Sequence
  Guide RNA
guacaugaauguuaguuaucac

SEQ ID NO: 35163 - RNA, 22 nt, Artificial Sequence
  Guide RNA
gugauaacaacuaacauucaug

SEQ ID NO: 35164 - RNA, 22 nt, Artificial Sequence
  Guide RNA
gugauaacuaacauucauguac

SEQ ID NO: 35165 - RNA, 22 nt, Artificial Sequence
  Guide RNA
guuaguuaucacauacagcaaa

SEQ ID NO: 35166 - RNA, 22 nt, Artificial Sequence
  Guide RNA
guuaguuguuaucacauacagc

SEQ ID NO: 35167 - RNA, 22 nt, Artificial Sequence
  Guide RNA
uaguuguuaucacauacagcaa

SEQ ID NO: 35168 - RNA, 22 nt, Artificial Sequence
  Guide RNA
ucaaguacaugaauguuaguug

SEQ ID NO: 35169 - RNA, 22 nt, Artificial Sequence
  Guide RNA
ugagcucaaguacaugaauguu

SEQ ID NO: 35170 - RNA, 22 nt, Artificial Sequence
  Guide RNA
ugcuguaugugauaacaacuaa

SEQ ID NO: 35171 - RNA, 22 nt, Artificial Sequence
  Guide RNA
ugcuguaugugauaacuaacau

SEQ ID NO: 35172 - RNA, 22 nt, Artificial Sequence
  Guide RNA
uguuaguuaucacauacagcaa

SEQ ID NO: 35173 - RNA, 22 nt, Artificial Sequence
  Guide RNA
uguuaguuguuaucacauacag

SEQ ID NO: 35174 - RNA, 22 nt, Artificial Sequence
  Guide RNA
uuaguuguuaucacauacagca

SEQ ID NO: 35175 - RNA, 22 nt, Artificial Sequence
  Guide RNA
uugcuguaugugauaacaacua

SEQ ID NO: 35176 - RNA, 22 nt, Artificial Sequence
  Guide RNA
uugcuguaugugauaacuaaca

SEQ ID NO: 35177 - RNA, 22 nt, Artificial Sequence
  Guide RNA
uuugcuguaugugauaacaacu

SEQ ID NO: 35178 - RNA, 22 nt, Artificial Sequence
  Guide RNA
uuugcuguaugugauaacuaac

SEQ ID NO: 35179 - RNA, 20 nt, Artificial Sequence
  Guide RNA
aaaaacguccugaaaguauu

SEQ ID NO: 35180 - RNA, 20 nt, Artificial Sequence
  Guide RNA
aaaaagugucucaacaaagu

SEQ ID NO: 35181 - RNA, 20 nt, Artificial Sequence
  Guide RNA
aaaacaaauguugguuuccu

SEQ ID NO: 35182 - RNA, 20 nt, Artificial Sequence
  Guide RNA
aaaacguccugaaaguauuu

SEQ ID NO: 35183 - RNA, 20 nt, Artificial Sequence
  Guide RNA
aaaagcaaugucaguuucaa

SEQ ID NO: 35184 - RNA, 20 nt, Artificial Sequence
  Guide RNA
aaaaguacugguugauuaag

SEQ ID NO: 35185 - RNA, 20 nt, Artificial Sequence
  Guide RNA
aaaagucaacaggggacccu

SEQ ID NO: 35186 - RNA, 20 nt, Artificial Sequence
  Guide RNA
aaaagugucucaacaaaguu

SEQ ID NO: 35187 - RNA, 20 nt, Artificial Sequence
  Guide RNA
aaaauaaucggugucaguau

SEQ ID NO: 35188 - RNA, 20 nt, Artificial Sequence
  Guide RNA
aaaaugacucaacaaaguug

SEQ ID NO: 35189 - RNA, 20 nt, Artificial Sequence
  Guide RNA
aaaauucacuagacagaaga

SEQ ID NO: 35190 - RNA, 20 nt, Artificial Sequence
  Guide RNA
aaacaaauguugguuuccuu

SEQ ID NO: 35191 - RNA, 20 nt, Artificial Sequence
  Guide RNA
aaacauggccccaagucacu

SEQ ID NO: 35192 - RNA, 20 nt, Artificial Sequence
  Guide RNA
aaaccaacauuuguuuuguc

SEQ ID NO: 35193 - RNA, 20 nt, Artificial Sequence
  Guide RNA
aaacguccugaaaguauuug

SEQ ID NO: 35194 - RNA, 20 nt, Artificial Sequence
  Guide RNA
aaacucuaagagauugugca

SEQ ID NO: 35195 - RNA, 20 nt, Artificial Sequence
  Guide RNA
aaacugacauugcuuuuagc

SEQ ID NO: 35196 - RNA, 20 nt, Artificial Sequence
  Guide RNA
aaacugcugcuaaaagcaau

SEQ ID NO: 35197 - RNA, 20 nt, Artificial Sequence
  Guide RNA
aaacuucuucuucugucuag

SEQ ID NO: 35198 - RNA, 20 nt, Artificial Sequence
  Guide RNA
aaagcaaugucaguuucaaa

SEQ ID NO: 35199 - RNA, 20 nt, Artificial Sequence
  Guide RNA
aaaguacugguugauuaagu

SEQ ID NO: 35200 - RNA, 20 nt, Artificial Sequence
  Guide RNA
aaaguagaacaccuaucagu

SEQ ID NO: 35201 - RNA, 20 nt, Artificial Sequence
  Guide RNA
aaagucaacaggggacccuu

SEQ ID NO: 35202 - RNA, 20 nt, Artificial Sequence
  Guide RNA
aaagugaaggguccccuguu

SEQ ID NO: 35203 - RNA, 20 nt, Artificial Sequence
  Guide RNA
aaagugucucaacaaaguua

SEQ ID NO: 35204 - RNA, 20 nt, Artificial Sequence
  Guide RNA
aaaguugagccaaaaagugu

SEQ ID NO: 35205 - RNA, 20 nt, Artificial Sequence
  Guide RNA
aaauaaucggugucaguauu

SEQ ID NO: 35206 - RNA, 20 nt, Artificial Sequence
  Guide RNA
aaauaauuccaguggccauu

SEQ ID NO: 35207 - RNA, 20 nt, Artificial Sequence
  Guide RNA
aaauaccacauaaacugcug

SEQ ID NO: 35208 - RNA, 20 nt, Artificial Sequence
  Guide RNA
aaauacuuucaggacguuuu

SEQ ID NO: 35209 - RNA, 20 nt, Artificial Sequence
  Guide RNA
aaaugacucaacaaaguuga

SEQ ID NO: 35210 - RNA, 20 nt, Artificial Sequence
  Guide RNA
aaaugcuuuggacaaguuac

SEQ ID NO: 35211 - RNA, 20 nt, Artificial Sequence
  Guide RNA
aaauguugguuuccuuauug

SEQ ID NO: 35212 - RNA, 20 nt, Artificial Sequence
  Guide RNA
aaauucacuagacagaagaa

SEQ ID NO: 35213 - RNA, 20 nt, Artificial Sequence
  Guide RNA
aacaaaguugagccaaaaag

SEQ ID NO: 35214 - RNA, 20 nt, Artificial Sequence
  Guide RNA
aacaaauaauuccaguggcc

SEQ ID NO: 35215 - RNA, 20 nt, Artificial Sequence
  Guide RNA
aacaaauguugguuuccuua

SEQ ID NO: 35216 - RNA, 20 nt, Artificial Sequence
  Guide RNA
aacacugucaugcacaaucu

SEQ ID NO: 35217 - RNA, 20 nt, Artificial Sequence
  Guide RNA
aacagacaaaacaaauguug

SEQ ID NO: 35218 - RNA, 20 nt, Artificial Sequence
  Guide RNA
aacaggggacccuucacuuu

SEQ ID NO: 35219 - RNA, 20 nt, Artificial Sequence
  Guide RNA
aacauggccccaagucacuu

SEQ ID NO: 35220 - RNA, 20 nt, Artificial Sequence
  Guide RNA
aaccaacauuuguuuugucu

SEQ ID NO: 35221 - RNA, 20 nt, Artificial Sequence
  Guide RNA
aaccaguacuuuuaaggugu

SEQ ID NO: 35222 - RNA, 20 nt, Artificial Sequence
  Guide RNA
aacguccugaaaguauuuga

SEQ ID NO: 35223 - RNA, 20 nt, Artificial Sequence
  Guide RNA
aacucuaagagauugugcau

SEQ ID NO: 35224 - RNA, 20 nt, Artificial Sequence
  Guide RNA
aacugacauugcuuuuagca

SEQ ID NO: 35225 - RNA, 20 nt, Artificial Sequence
  Guide RNA
aacugauagguguucuacuu

SEQ ID NO: 35226 - RNA, 20 nt, Artificial Sequence
  Guide RNA
aacugcugcuaaaagcaaug

SEQ ID NO: 35227 - RNA, 20 nt, Artificial Sequence
  Guide RNA
aacuuaggauccagacuaua

SEQ ID NO: 35228 - RNA, 20 nt, Artificial Sequence
  Guide RNA
aacuucuucuucugucuagu

SEQ ID NO: 35229 - RNA, 20 nt, Artificial Sequence
  Guide RNA
aacuuguccaaagcauuuag

SEQ ID NO: 35230 - RNA, 20 nt, Artificial Sequence
  Guide RNA
aacuuuguugagacacuuuu

SEQ ID NO: 35231 - RNA, 20 nt, Artificial Sequence
  Guide RNA
aagaagaaguuuacaccuua

SEQ ID NO: 35232 - RNA, 20 nt, Artificial Sequence
  Guide RNA
aagagaaauaccacauaaac

SEQ ID NO: 35233 - RNA, 20 nt, Artificial Sequence
  Guide RNA
aagagauugugcaugacagu

SEQ ID NO: 35234 - RNA, 20 nt, Artificial Sequence
  Guide RNA
aagaugaauuccaucaaugg

SEQ ID NO: 35235 - RNA, 20 nt, Artificial Sequence
  Guide RNA
aagcaaugucaguuucaaaa

SEQ ID NO: 35236 - RNA, 20 nt, Artificial Sequence
  Guide RNA
aaggaaaauucacuagacag

SEQ ID NO: 35237 - RNA, 20 nt, Artificial Sequence
  Guide RNA
aaggaaaccaacauuuguuu

SEQ ID NO: 35238 - RNA, 20 nt, Artificial Sequence
  Guide RNA
aagggggaaaagucaacagg

SEQ ID NO: 35239 - RNA, 20 nt, Artificial Sequence
  Guide RNA
aaggguccccuguugacuuu

SEQ ID NO: 35240 - RNA, 20 nt, Artificial Sequence
  Guide RNA
aagguaguaaaauuaagggg

SEQ ID NO: 35241 - RNA, 20 nt, Artificial Sequence
  Guide RNA
aagguguaaacuucuucuuc

SEQ ID NO: 35242 - RNA, 20 nt, Artificial Sequence
  Guide RNA
aaguacugguugauuaagug

SEQ ID NO: 35243 - RNA, 20 nt, Artificial Sequence
  Guide RNA
aaguagaacaccuaucaguu

SEQ ID NO: 35244 - RNA, 20 nt, Artificial Sequence
  Guide RNA
aagucaacaggggacccuuc

SEQ ID NO: 35245 - RNA, 20 nt, Artificial Sequence
  Guide RNA
aagucacuuaaucaaccagu

SEQ ID NO: 35246 - RNA, 20 nt, Artificial Sequence
  Guide RNA
aagugaaggguccccuguug

SEQ ID NO: 35247 - RNA, 20 nt, Artificial Sequence
  Guide RNA
aagugacuuggggccauguu

SEQ ID NO: 35248 - RNA, 20 nt, Artificial Sequence
  Guide RNA
aagugucucaacaaaguuaa

SEQ ID NO: 35249 - RNA, 20 nt, Artificial Sequence
  Guide RNA
aaguuacggaauacugacac

SEQ ID NO: 35250 - RNA, 20 nt, Artificial Sequence
  Guide RNA
aaguugagccaaaaaguguc

SEQ ID NO: 35251 - RNA, 20 nt, Artificial Sequence
  Guide RNA
aaguuggaaaauaaucggug

SEQ ID NO: 35252 - RNA, 20 nt, Artificial Sequence
  Guide RNA
aauaaggaaaccaacauuug

SEQ ID NO: 35253 - RNA, 20 nt, Artificial Sequence
  Guide RNA
aauaaucggugucaguauuc

SEQ ID NO: 35254 - RNA, 20 nt, Artificial Sequence
  Guide RNA
aauaauuccaguggccauug

SEQ ID NO: 35255 - RNA, 20 nt, Artificial Sequence
  Guide RNA
aauaccacauaaacugcugc

SEQ ID NO: 35256 - RNA, 20 nt, Artificial Sequence
  Guide RNA
aauacugacaccgauuauuu

SEQ ID NO: 35257 - RNA, 20 nt, Artificial Sequence
  Guide RNA
aauacuuucaggacguuuuu

SEQ ID NO: 35258 - RNA, 20 nt, Artificial Sequence
  Guide RNA
aaucaaccaguacuuuuaag

SEQ ID NO: 35259 - RNA, 20 nt, Artificial Sequence
  Guide RNA
aauccccuuaauuuuacuac

SEQ ID NO: 35260 - RNA, 20 nt, Artificial Sequence
  Guide RNA
aaucggugucaguauuccgu

SEQ ID NO: 35261 - RNA, 20 nt, Artificial Sequence
  Guide RNA
aaugacucaacaaaguugag

SEQ ID NO: 35262 - RNA, 20 nt, Artificial Sequence
  Guide RNA
aaugcuuuggacaaguuacg

SEQ ID NO: 35263 - RNA, 20 nt, Artificial Sequence
  Guide RNA
aauggccacuggaauuauuu

SEQ ID NO: 35264 - RNA, 20 nt, Artificial Sequence
  Guide RNA
aaugucaguuucaaaagaag

SEQ ID NO: 35265 - RNA, 20 nt, Artificial Sequence
  Guide RNA
aaugucuauguaaaacagac

SEQ ID NO: 35266 - RNA, 20 nt, Artificial Sequence
  Guide RNA
aauguugguuuccuuauuga

SEQ ID NO: 35267 - RNA, 20 nt, Artificial Sequence
  Guide RNA
aauucacuagacagaagaag

SEQ ID NO: 35268 - RNA, 20 nt, Artificial Sequence
  Guide RNA
aauucaucuuccaguaaaca

SEQ ID NO: 35269 - RNA, 20 nt, Artificial Sequence
  Guide RNA
aauuccaguggccauugaug

SEQ ID NO: 35270 - RNA, 20 nt, Artificial Sequence
  Guide RNA
aauuccaucaauggccacug

SEQ ID NO: 35271 - RNA, 20 nt, Artificial Sequence
  Guide RNA
acaaaacaaauguugguuuc

SEQ ID NO: 35272 - RNA, 20 nt, Artificial Sequence
  Guide RNA
acaaaguugagccaaaaagu

SEQ ID NO: 35273 - RNA, 20 nt, Artificial Sequence
  Guide RNA
acaaauaauuccaguggcca

SEQ ID NO: 35274 - RNA, 20 nt, Artificial Sequence
  Guide RNA
acaaauguugguuuccuuau

SEQ ID NO: 35275 - RNA, 20 nt, Artificial Sequence
  Guide RNA
acaacaaauaauuccagugg

SEQ ID NO: 35276 - RNA, 20 nt, Artificial Sequence
  Guide RNA
acaaguuacggaauacugac

SEQ ID NO: 35277 - RNA, 20 nt, Artificial Sequence
  Guide RNA
acaaucucuuagaguuuaga

SEQ ID NO: 35278 - RNA, 20 nt, Artificial Sequence
  Guide RNA
acacauuucauucuagaacu

SEQ ID NO: 35279 - RNA, 20 nt, Artificial Sequence
  Guide RNA
acaccgauuauuuuccaacu

SEQ ID NO: 35280 - RNA, 20 nt, Artificial Sequence
  Guide RNA
acaccuuaaaaguacugguu

SEQ ID NO: 35281 - RNA, 20 nt, Artificial Sequence
  Guide RNA
acacugucaugcacaaucuc

SEQ ID NO: 35282 - RNA, 20 nt, Artificial Sequence
  Guide RNA
acacuuuuuggcucaacuuu

SEQ ID NO: 35283 - RNA, 20 nt, Artificial Sequence
  Guide RNA
acagaagaagaaguuuacac

SEQ ID NO: 35284 - RNA, 20 nt, Artificial Sequence
  Guide RNA
acagacaaaacaaauguugg

SEQ ID NO: 35285 - RNA, 20 nt, Artificial Sequence
  Guide RNA
acaggggacccuucacuuuc

SEQ ID NO: 35286 - RNA, 20 nt, Artificial Sequence
  Guide RNA
acaguguucauggugacuau

SEQ ID NO: 35287 - RNA, 20 nt, Artificial Sequence
  Guide RNA
acauaaacugcugcuaaaag

SEQ ID NO: 35288 - RNA, 20 nt, Artificial Sequence
  Guide RNA
acauaagagaaauaccacau

SEQ ID NO: 35289 - RNA, 20 nt, Artificial Sequence
  Guide RNA
acauagaaagugaagggucc

SEQ ID NO: 35290 - RNA, 20 nt, Artificial Sequence
  Guide RNA
acauagacauuuaguucuag

SEQ ID NO: 35291 - RNA, 20 nt, Artificial Sequence
  Guide RNA
acauggccccaagucacuua

SEQ ID NO: 35292 - RNA, 20 nt, Artificial Sequence
  Guide RNA
acauugcuuuuagcagcagu

SEQ ID NO: 35293 - RNA, 20 nt, Artificial Sequence
  Guide RNA
accaacauuuguuuugucug

SEQ ID NO: 35294 - RNA, 20 nt, Artificial Sequence
  Guide RNA
accacauaaacugcugcuaa

SEQ ID NO: 35295 - RNA, 20 nt, Artificial Sequence
  Guide RNA
accaguacuuuuaaggugua

SEQ ID NO: 35296 - RNA, 20 nt, Artificial Sequence
  Guide RNA
accaugaacacugucaugca

SEQ ID NO: 35297 - RNA, 20 nt, Artificial Sequence
  Guide RNA
acccuucacuuucuauguca

SEQ ID NO: 35298 - RNA, 20 nt, Artificial Sequence
  Guide RNA
accgauuauuuuccaacuua

SEQ ID NO: 35299 - RNA, 20 nt, Artificial Sequence
  Guide RNA
accuuaaaaguacugguuga

SEQ ID NO: 35300 - RNA, 20 nt, Artificial Sequence
  Guide RNA
acggaauacugacaccgauu

SEQ ID NO: 35301 - RNA, 20 nt, Artificial Sequence
  Guide RNA
acguccugaaaguauuugac

SEQ ID NO: 35302 - RNA, 20 nt, Artificial Sequence
  Guide RNA
acuaccuucuucauauuucu

SEQ ID NO: 35303 - RNA, 20 nt, Artificial Sequence
  Guide RNA
acuagacagaagaagaaguu

SEQ ID NO: 35304 - RNA, 20 nt, Artificial Sequence
  Guide RNA
acuaucucugaagggggaaa

SEQ ID NO: 35305 - RNA, 20 nt, Artificial Sequence
  Guide RNA
acucaacaaaguugagccaa

SEQ ID NO: 35306 - RNA, 20 nt, Artificial Sequence
  Guide RNA
acucuaagagauugugcaug

SEQ ID NO: 35307 - RNA, 20 nt, Artificial Sequence
  Guide RNA
acugacaccgauuauuuucc

SEQ ID NO: 35308 - RNA, 20 nt, Artificial Sequence
  Guide RNA
acugacauugcuuuuagcag

SEQ ID NO: 35309 - RNA, 20 nt, Artificial Sequence
  Guide RNA
acugauagguguucuacuuu

SEQ ID NO: 35310 - RNA, 20 nt, Artificial Sequence
  Guide RNA
acugcugcuaaaagcaaugu

SEQ ID NO: 35311 - RNA, 20 nt, Artificial Sequence
  Guide RNA
acuggaagaugaauuccauc

SEQ ID NO: 35312 - RNA, 20 nt, Artificial Sequence
  Guide RNA
acuggaauuauuuguuguag

SEQ ID NO: 35313 - RNA, 20 nt, Artificial Sequence
  Guide RNA
acugguugauuaagugacuu

SEQ ID NO: 35314 - RNA, 20 nt, Artificial Sequence
  Guide RNA
acugucaugcacaaucucuu

SEQ ID NO: 35315 - RNA, 20 nt, Artificial Sequence
  Guide RNA
acuuaacuuuguugagacac

SEQ ID NO: 35316 - RNA, 20 nt, Artificial Sequence
  Guide RNA
acuuaaucaaccaguacuuu

SEQ ID NO: 35317 - RNA, 20 nt, Artificial Sequence
  Guide RNA
acuuaggauccagacuauag

SEQ ID NO: 35318 - RNA, 20 nt, Artificial Sequence
  Guide RNA
acuucuucuucugucuagug

SEQ ID NO: 35319 - RNA, 20 nt, Artificial Sequence
  Guide RNA
acuucuuucuauagucugga

SEQ ID NO: 35320 - RNA, 20 nt, Artificial Sequence
  Guide RNA
acuuggggccauguuuacug

SEQ ID NO: 35321 - RNA, 20 nt, Artificial Sequence
  Guide RNA
acuuguccaaagcauuuagg

SEQ ID NO: 35322 - RNA, 20 nt, Artificial Sequence
  Guide RNA
acuuucaggacguuuuuaaa

SEQ ID NO: 35323 - RNA, 20 nt, Artificial Sequence
  Guide RNA
acuuuguugagacacuuuuu

SEQ ID NO: 35324 - RNA, 20 nt, Artificial Sequence
  Guide RNA
acuuuuaagguguaaacuuc

SEQ ID NO: 35325 - RNA, 20 nt, Artificial Sequence
  Guide RNA
acuuuuauacaguuuugcca

SEQ ID NO: 35326 - RNA, 20 nt, Artificial Sequence
  Guide RNA
acuuuucccccuucagagau

SEQ ID NO: 35327 - RNA, 20 nt, Artificial Sequence
  Guide RNA
acuuuuuggcucaacuuugu

SEQ ID NO: 35328 - RNA, 20 nt, Artificial Sequence
  Guide RNA
agaaagugaaggguccccug

SEQ ID NO: 35329 - RNA, 20 nt, Artificial Sequence
  Guide RNA
agaaauaccacauaaacugc

SEQ ID NO: 35330 - RNA, 20 nt, Artificial Sequence
  Guide RNA
agaaauaugaagaagguagu

SEQ ID NO: 35331 - RNA, 20 nt, Artificial Sequence
  Guide RNA
agaacaccuaucaguuaaaa

SEQ ID NO: 35332 - RNA, 20 nt, Artificial Sequence
  Guide RNA
agaagaagaaguuuacaccu

SEQ ID NO: 35333 - RNA, 20 nt, Artificial Sequence
  Guide RNA
agaagaaguuuacaccuuaa

SEQ ID NO: 35334 - RNA, 20 nt, Artificial Sequence
  Guide RNA
agaagguaguaaaauuaagg

SEQ ID NO: 35335 - RNA, 20 nt, Artificial Sequence
  Guide RNA
agaaguuuacaccuuaaaag

SEQ ID NO: 35336 - RNA, 20 nt, Artificial Sequence
  Guide RNA
agacaaaacaaauguugguu

SEQ ID NO: 35337 - RNA, 20 nt, Artificial Sequence
  Guide RNA
agacacuuuuuggcucaacu

SEQ ID NO: 35338 - RNA, 20 nt, Artificial Sequence
  Guide RNA
agacagaagaagaaguuuac

SEQ ID NO: 35339 - RNA, 20 nt, Artificial Sequence
  Guide RNA
agacauuuaguucuagaaug

SEQ ID NO: 35340 - RNA, 20 nt, Artificial Sequence
  Guide RNA
agagaaauaccacauaaacu

SEQ ID NO: 35341 - RNA, 20 nt, Artificial Sequence
  Guide RNA
agagauagucaccaugaaca

SEQ ID NO: 35342 - RNA, 20 nt, Artificial Sequence
  Guide RNA
agagauugugcaugacagug

SEQ ID NO: 35343 - RNA, 20 nt, Artificial Sequence
  Guide RNA
agauagucaccaugaacacu

SEQ ID NO: 35344 - RNA, 20 nt, Artificial Sequence
  Guide RNA
agauauuccuaaaugcuuug

SEQ ID NO: 35345 - RNA, 20 nt, Artificial Sequence
  Guide RNA
agaugaauuccaucaauggc

SEQ ID NO: 35346 - RNA, 20 nt, Artificial Sequence
  Guide RNA
agauugugcaugacaguguu

SEQ ID NO: 35347 - RNA, 20 nt, Artificial Sequence
  Guide RNA
agcaaugucaguuucaaaag

SEQ ID NO: 35348 - RNA, 20 nt, Artificial Sequence
  Guide RNA
agcacuuuuauacaguuuug

SEQ ID NO: 35349 - RNA, 20 nt, Artificial Sequence
  Guide RNA
agcagcaguuuaugugguau

SEQ ID NO: 35350 - RNA, 20 nt, Artificial Sequence
  Guide RNA
agcaguuuaugugguauuuc

SEQ ID NO: 35351 - RNA, 20 nt, Artificial Sequence
  Guide RNA
agcauuuaggaauaucuauc

SEQ ID NO: 35352 - RNA, 20 nt, Artificial Sequence
  Guide RNA
agccaaaaagugucucaaca

SEQ ID NO: 35353 - RNA, 20 nt, Artificial Sequence
  Guide RNA
agccaaauuaaugguuaaac

SEQ ID NO: 35354 - RNA, 20 nt, Artificial Sequence
  Guide RNA
aggaaaauucacuagacaga

SEQ ID NO: 35355 - RNA, 20 nt, Artificial Sequence
  Guide RNA
aggaaaccaacauuuguuuu

SEQ ID NO: 35356 - RNA, 20 nt, Artificial Sequence
  Guide RNA
aggagauuuaacauuuacac

SEQ ID NO: 35357 - RNA, 20 nt, Artificial Sequence
  Guide RNA
aggauccagacuauagaaag

SEQ ID NO: 35358 - RNA, 20 nt, Artificial Sequence
  Guide RNA
aggggacccuucacuuucua

SEQ ID NO: 35359 - RNA, 20 nt, Artificial Sequence
  Guide RNA
agggggaaaagucaacaggg

SEQ ID NO: 35360 - RNA, 20 nt, Artificial Sequence
  Guide RNA
aggguccccuguugacuuuu

SEQ ID NO: 35361 - RNA, 20 nt, Artificial Sequence
  Guide RNA
agguaguaaaauuaagggga

SEQ ID NO: 35362 - RNA, 20 nt, Artificial Sequence
  Guide RNA
agguguaaacuucuucuucu

SEQ ID NO: 35363 - RNA, 20 nt, Artificial Sequence
  Guide RNA
aguaaacauggccccaaguc

SEQ ID NO: 35364 - RNA, 20 nt, Artificial Sequence
  Guide RNA
aguacugguugauuaaguga

SEQ ID NO: 35365 - RNA, 20 nt, Artificial Sequence
  Guide RNA
aguacuuuuaagguguaaac

SEQ ID NO: 35366 - RNA, 20 nt, Artificial Sequence
  Guide RNA
aguagaacaccuaucaguua

SEQ ID NO: 35367 - RNA, 20 nt, Artificial Sequence
  Guide RNA
aguauuccguaacuugucca

SEQ ID NO: 35368 - RNA, 20 nt, Artificial Sequence
  Guide RNA
aguauuugacauagaaagug

SEQ ID NO: 35369 - RNA, 20 nt, Artificial Sequence
  Guide RNA
agucaacaggggacccuuca

SEQ ID NO: 35370 - RNA, 20 nt, Artificial Sequence
  Guide RNA
agucaccaugaacacuguca

SEQ ID NO: 35371 - RNA, 20 nt, Artificial Sequence
  Guide RNA
agucacuuaaucaaccagua

SEQ ID NO: 35372 - RNA, 20 nt, Artificial Sequence
  Guide RNA
agucuggauccuaaguugga

SEQ ID NO: 35373 - RNA, 20 nt, Artificial Sequence
  Guide RNA
agugaaggguccccuguuga

SEQ ID NO: 35374 - RNA, 20 nt, Artificial Sequence
  Guide RNA
agugacuuggggccauguuu

SEQ ID NO: 35375 - RNA, 20 nt, Artificial Sequence
  Guide RNA
aguggccauugauggaauuc

SEQ ID NO: 35376 - RNA, 20 nt, Artificial Sequence
  Guide RNA
agugucucaacaaaguuaag

SEQ ID NO: 35377 - RNA, 20 nt, Artificial Sequence
  Guide RNA
aguguucauggugacuaucu

SEQ ID NO: 35378 - RNA, 20 nt, Artificial Sequence
  Guide RNA
aguuacggaauacugacacc

SEQ ID NO: 35379 - RNA, 20 nt, Artificial Sequence
  Guide RNA
aguucuagaaugaaaugugu

SEQ ID NO: 35380 - RNA, 20 nt, Artificial Sequence
  Guide RNA
aguugagccaaaaagugucu

SEQ ID NO: 35381 - RNA, 20 nt, Artificial Sequence
  Guide RNA
aguuggaaaauaaucggugu

SEQ ID NO: 35382 - RNA, 20 nt, Artificial Sequence
  Guide RNA
aguuuacaccuuaaaaguac

SEQ ID NO: 35383 - RNA, 20 nt, Artificial Sequence
  Guide RNA
aguuuaugugguauuucucu

SEQ ID NO: 35384 - RNA, 20 nt, Artificial Sequence
  Guide RNA
auaaacugcugcuaaaagca

SEQ ID NO: 35385 - RNA, 20 nt, Artificial Sequence
  Guide RNA
auaaggaaaccaacauuugu

SEQ ID NO: 35386 - RNA, 20 nt, Artificial Sequence
  Guide RNA
auaaucggugucaguauucc

SEQ ID NO: 35387 - RNA, 20 nt, Artificial Sequence
  Guide RNA
auaauuccaguggccauuga

SEQ ID NO: 35388 - RNA, 20 nt, Artificial Sequence
  Guide RNA
auaccacauaaacugcugcu

SEQ ID NO: 35389 - RNA, 20 nt, Artificial Sequence
  Guide RNA
auacugacaccgauuauuuu

SEQ ID NO: 35390 - RNA, 20 nt, Artificial Sequence
  Guide RNA
auacuuaacuuuguugagac

SEQ ID NO: 35391 - RNA, 20 nt, Artificial Sequence
  Guide RNA
auacuuucaggacguuuuua

SEQ ID NO: 35392 - RNA, 20 nt, Artificial Sequence
  Guide RNA
auagaaagugaagggucccc

SEQ ID NO: 35393 - RNA, 20 nt, Artificial Sequence
  Guide RNA
auagucaccaugaacacugu

SEQ ID NO: 35394 - RNA, 20 nt, Artificial Sequence
  Guide RNA
auagucuggauccuaaguug

SEQ ID NO: 35395 - RNA, 20 nt, Artificial Sequence
  Guide RNA
auauuccuaaaugcuuugga

SEQ ID NO: 35396 - RNA, 20 nt, Artificial Sequence
  Guide RNA
aucaaccaguacuuuuaagg

SEQ ID NO: 35397 - RNA, 20 nt, Artificial Sequence
  Guide RNA
aucaauggccacuggaauua

SEQ ID NO: 35398 - RNA, 20 nt, Artificial Sequence
  Guide RNA
auccagacuauagaaagaag

SEQ ID NO: 35399 - RNA, 20 nt, Artificial Sequence
  Guide RNA
auccccuuaauuuuacuacc

SEQ ID NO: 35400 - RNA, 20 nt, Artificial Sequence
  Guide RNA
aucggugucaguauuccgua

SEQ ID NO: 35401 - RNA, 20 nt, Artificial Sequence
  Guide RNA
aucucugaagggggaaaagu

SEQ ID NO: 35402 - RNA, 20 nt, Artificial Sequence
  Guide RNA
aucuuccaguaaacauggcc

SEQ ID NO: 35403 - RNA, 20 nt, Artificial Sequence
  Guide RNA
augaacacugucaugcacaa

SEQ ID NO: 35404 - RNA, 20 nt, Artificial Sequence
  Guide RNA
augaauuccaucaauggcca

SEQ ID NO: 35405 - RNA, 20 nt, Artificial Sequence
  Guide RNA
augacaguguucauggugac

SEQ ID NO: 35406 - RNA, 20 nt, Artificial Sequence
  Guide RNA
augacucaacaaaguugagc

SEQ ID NO: 35407 - RNA, 20 nt, Artificial Sequence
  Guide RNA
augcacaaucucuuagaguu

SEQ ID NO: 35408 - RNA, 20 nt, Artificial Sequence
  Guide RNA
augcuuuggacaaguuacgg

SEQ ID NO: 35409 - RNA, 20 nt, Artificial Sequence
  Guide RNA
auggaauucaucuuccagua

SEQ ID NO: 35410 - RNA, 20 nt, Artificial Sequence
  Guide RNA
auggccacuggaauuauuug

SEQ ID NO: 35411 - RNA, 20 nt, Artificial Sequence
  Guide RNA
auggccccaagucacuuaau

SEQ ID NO: 35412 - RNA, 20 nt, Artificial Sequence
  Guide RNA
auggugacuaucucugaagg

SEQ ID NO: 35413 - RNA, 20 nt, Artificial Sequence
  Guide RNA
augucaaauacuuucaggac

SEQ ID NO: 35414 - RNA, 20 nt, Artificial Sequence
  Guide RNA
augucaguuucaaaagaaga

SEQ ID NO: 35415 - RNA, 20 nt, Artificial Sequence
  Guide RNA
augucuauguaaaacagaca

SEQ ID NO: 35416 - RNA, 20 nt, Artificial Sequence
  Guide RNA
augugcaauuagcacaaaaa

SEQ ID NO: 35417 - RNA, 20 nt, Artificial Sequence
  Guide RNA
augugguauuucucuuaugu

SEQ ID NO: 35418 - RNA, 20 nt, Artificial Sequence
  Guide RNA
auguugguuuccuuauugaa

SEQ ID NO: 35419 - RNA, 20 nt, Artificial Sequence
  Guide RNA
auguuuacuggaagaugaau

SEQ ID NO: 35420 - RNA, 20 nt, Artificial Sequence
  Guide RNA
auuaagugacuuggggccau

SEQ ID NO: 35421 - RNA, 20 nt, Artificial Sequence
  Guide RNA
auucacuagacagaagaaga

SEQ ID NO: 35422 - RNA, 20 nt, Artificial Sequence
  Guide RNA
auucaucuuccaguaaacau

SEQ ID NO: 35423 - RNA, 20 nt, Artificial Sequence
  Guide RNA
auuccaguggccauugaugg

SEQ ID NO: 35424 - RNA, 20 nt, Artificial Sequence
  Guide RNA
auuccaucaauggccacugg

SEQ ID NO: 35425 - RNA, 20 nt, Artificial Sequence
  Guide RNA
auuccguaacuuguccaaag

SEQ ID NO: 35426 - RNA, 20 nt, Artificial Sequence
  Guide RNA
auuccuaaaugcuuuggaca

SEQ ID NO: 35427 - RNA, 20 nt, Artificial Sequence
  Guide RNA
auugauggaauucaucuucc

SEQ ID NO: 35428 - RNA, 20 nt, Artificial Sequence
  Guide RNA
auugcacauaagagaaauac

SEQ ID NO: 35429 - RNA, 20 nt, Artificial Sequence
  Guide RNA
auugcuuuuagcagcaguuu

SEQ ID NO: 35430 - RNA, 20 nt, Artificial Sequence
  Guide RNA
auugugcaugacaguguuca

SEQ ID NO: 35431 - RNA, 20 nt, Artificial Sequence
  Guide RNA
auuuaaaaacguccugaaag

SEQ ID NO: 35432 - RNA, 20 nt, Artificial Sequence
  Guide RNA
auuucaauaaggaaaccaac

SEQ ID NO: 35433 - RNA, 20 nt, Artificial Sequence
  Guide RNA
auuugacauagaaagugaag

SEQ ID NO: 35434 - RNA, 20 nt, Artificial Sequence
  Guide RNA
auuuuccaacuuaggaucca

SEQ ID NO: 35435 - RNA, 20 nt, Artificial Sequence
  Guide RNA
auuuuuugugcuaauugcac

SEQ ID NO: 35436 - RNA, 20 nt, Artificial Sequence
  Guide RNA
caaaaagugucucaacaaag

SEQ ID NO: 35437 - RNA, 20 nt, Artificial Sequence
  Guide RNA
caaaacaaauguugguuucc

SEQ ID NO: 35438 - RNA, 20 nt, Artificial Sequence
  Guide RNA
caaaacuguauaaaagugcu

SEQ ID NO: 35439 - RNA, 20 nt, Artificial Sequence
  Guide RNA
caaagcauuuaggaauaucu

SEQ ID NO: 35440 - RNA, 20 nt, Artificial Sequence
  Guide RNA
caaaguugagccaaaaagug

SEQ ID NO: 35441 - RNA, 20 nt, Artificial Sequence
  Guide RNA
caaauaauuccaguggccau

SEQ ID NO: 35442 - RNA, 20 nt, Artificial Sequence
  Guide RNA
caaauacuuucaggacguuu

SEQ ID NO: 35443 - RNA, 20 nt, Artificial Sequence
  Guide RNA
caaauguugguuuccuuauu

SEQ ID NO: 35444 - RNA, 20 nt, Artificial Sequence
  Guide RNA
caacaaacuuuucuacaaca

SEQ ID NO: 35445 - RNA, 20 nt, Artificial Sequence
  Guide RNA
caacaaaguugagccaaaaa

SEQ ID NO: 35446 - RNA, 20 nt, Artificial Sequence
  Guide RNA
caacaaauaauuccaguggc

SEQ ID NO: 35447 - RNA, 20 nt, Artificial Sequence
  Guide RNA
caacaggggacccuucacuu

SEQ ID NO: 35448 - RNA, 20 nt, Artificial Sequence
  Guide RNA
caacauuuguuuugucuguu

SEQ ID NO: 35449 - RNA, 20 nt, Artificial Sequence
  Guide RNA
caaccaguacuuuuaaggug

SEQ ID NO: 35450 - RNA, 20 nt, Artificial Sequence
  Guide RNA
caacuuaggauccagacuau

SEQ ID NO: 35451 - RNA, 20 nt, Artificial Sequence
  Guide RNA
caacuuuguugagucauuuu

SEQ ID NO: 35452 - RNA, 20 nt, Artificial Sequence
  Guide RNA
caagucacuuaaucaaccag

SEQ ID NO: 35453 - RNA, 20 nt, Artificial Sequence
  Guide RNA
caaguuacggaauacugaca

SEQ ID NO: 35454 - RNA, 20 nt, Artificial Sequence
  Guide RNA
caauaaggaaaccaacauuu

SEQ ID NO: 35455 - RNA, 20 nt, Artificial Sequence
  Guide RNA
caaucucuuagaguuuagaa

SEQ ID NO: 35456 - RNA, 20 nt, Artificial Sequence
  Guide RNA
caauggccacuggaauuauu

SEQ ID NO: 35457 - RNA, 20 nt, Artificial Sequence
  Guide RNA
caaugucaguuucaaaagaa

SEQ ID NO: 35458 - RNA, 20 nt, Artificial Sequence
  Guide RNA
cacaaucucuuagaguuuag

SEQ ID NO: 35459 - RNA, 20 nt, Artificial Sequence
  Guide RNA
cacauaaacugcugcuaaaa

SEQ ID NO: 35460 - RNA, 20 nt, Artificial Sequence
  Guide RNA
cacauaagagaaauaccaca

SEQ ID NO: 35461 - RNA, 20 nt, Artificial Sequence
  Guide RNA
cacauuucauucuagaacua

SEQ ID NO: 35462 - RNA, 20 nt, Artificial Sequence
  Guide RNA
caccaugaacacugucaugc

SEQ ID NO: 35463 - RNA, 20 nt, Artificial Sequence
  Guide RNA
caccgauuauuuuccaacuu

SEQ ID NO: 35464 - RNA, 20 nt, Artificial Sequence
  Guide RNA
caccuuaaaaguacugguug

SEQ ID NO: 35465 - RNA, 20 nt, Artificial Sequence
  Guide RNA
cacuagacagaagaagaagu

SEQ ID NO: 35466 - RNA, 20 nt, Artificial Sequence
  Guide RNA
cacuggaauuauuuguugua

SEQ ID NO: 35467 - RNA, 20 nt, Artificial Sequence
  Guide RNA
cacugucaugcacaaucucu

SEQ ID NO: 35468 - RNA, 20 nt, Artificial Sequence
  Guide RNA
cacuuaaucaaccaguacuu

SEQ ID NO: 35469 - RNA, 20 nt, Artificial Sequence
  Guide RNA
cacuuucuaugucaaauacu

SEQ ID NO: 35470 - RNA, 20 nt, Artificial Sequence
  Guide RNA
cacuuuuauacaguuuugcc

SEQ ID NO: 35471 - RNA, 20 nt, Artificial Sequence
  Guide RNA
cacuuuuuggcucaacuuug

SEQ ID NO: 35472 - RNA, 20 nt, Artificial Sequence
  Guide RNA
cagaagaagaaguuuacacc

SEQ ID NO: 35473 - RNA, 20 nt, Artificial Sequence
  Guide RNA
cagacaaaacaaauguuggu

SEQ ID NO: 35474 - RNA, 20 nt, Artificial Sequence
  Guide RNA
cagacuauagaaagaaguaa

SEQ ID NO: 35475 - RNA, 20 nt, Artificial Sequence
  Guide RNA
cagagauagucaccaugaac

SEQ ID NO: 35476 - RNA, 20 nt, Artificial Sequence
  Guide RNA
cagcaguuuaugugguauuu

SEQ ID NO: 35477 - RNA, 20 nt, Artificial Sequence
  Guide RNA
caggggacccuucacuuucu

SEQ ID NO: 35478 - RNA, 20 nt, Artificial Sequence
  Guide RNA
caguaaacauggccccaagu

SEQ ID NO: 35479 - RNA, 20 nt, Artificial Sequence
  Guide RNA
caguacuuuuaagguguaaa

SEQ ID NO: 35480 - RNA, 20 nt, Artificial Sequence
  Guide RNA
caguauuccguaacuugucc

SEQ ID NO: 35481 - RNA, 20 nt, Artificial Sequence
  Guide RNA
caguggccauugauggaauu

SEQ ID NO: 35482 - RNA, 20 nt, Artificial Sequence
  Guide RNA
caguguucauggugacuauc

SEQ ID NO: 35483 - RNA, 20 nt, Artificial Sequence
  Guide RNA
caguuuaugugguauuucuc

SEQ ID NO: 35484 - RNA, 20 nt, Artificial Sequence
  Guide RNA
cauaaacugcugcuaaaagc

SEQ ID NO: 35485 - RNA, 20 nt, Artificial Sequence
  Guide RNA
cauaagagaaauaccacaua

SEQ ID NO: 35486 - RNA, 20 nt, Artificial Sequence
  Guide RNA
cauagaaagugaaggguccc

SEQ ID NO: 35487 - RNA, 20 nt, Artificial Sequence
  Guide RNA
cauagacauuuaguucuaga

SEQ ID NO: 35488 - RNA, 20 nt, Artificial Sequence
  Guide RNA
caucaauggccacuggaauu

SEQ ID NO: 35489 - RNA, 20 nt, Artificial Sequence
  Guide RNA
caucuuccaguaaacauggc

SEQ ID NO: 35490 - RNA, 20 nt, Artificial Sequence
  Guide RNA
caugaacacugucaugcaca

SEQ ID NO: 35491 - RNA, 20 nt, Artificial Sequence
  Guide RNA
caugacaguguucaugguga

SEQ ID NO: 35492 - RNA, 20 nt, Artificial Sequence
  Guide RNA
caugcacaaucucuuagagu

SEQ ID NO: 35493 - RNA, 20 nt, Artificial Sequence
  Guide RNA
cauggccccaagucacuuaa

SEQ ID NO: 35494 - RNA, 20 nt, Artificial Sequence
  Guide RNA
cauggugacuaucucugaag

SEQ ID NO: 35495 - RNA, 20 nt, Artificial Sequence
  Guide RNA
cauguuuacuggaagaugaa

SEQ ID NO: 35496 - RNA, 20 nt, Artificial Sequence
  Guide RNA
cauuaagcacuuuuauacag

SEQ ID NO: 35497 - RNA, 20 nt, Artificial Sequence
  Guide RNA
cauucuagaacuaaaugucu

SEQ ID NO: 35498 - RNA, 20 nt, Artificial Sequence
  Guide RNA
cauugauggaauucaucuuc

SEQ ID NO: 35499 - RNA, 20 nt, Artificial Sequence
  Guide RNA
cauugcuuuuagcagcaguu

SEQ ID NO: 35500 - RNA, 20 nt, Artificial Sequence
  Guide RNA
ccaaaaagugucucaacaaa

SEQ ID NO: 35501 - RNA, 20 nt, Artificial Sequence
  Guide RNA
ccaaagcauuuaggaauauc

SEQ ID NO: 35502 - RNA, 20 nt, Artificial Sequence
  Guide RNA
ccaacauuuguuuugucugu

SEQ ID NO: 35503 - RNA, 20 nt, Artificial Sequence
  Guide RNA
ccaacuuaggauccagacua

SEQ ID NO: 35504 - RNA, 20 nt, Artificial Sequence
  Guide RNA
ccaagucacuuaaucaacca

SEQ ID NO: 35505 - RNA, 20 nt, Artificial Sequence
  Guide RNA
ccacauaaacugcugcuaaa

SEQ ID NO: 35506 - RNA, 20 nt, Artificial Sequence
  Guide RNA
ccacuggaauuauuuguugu

SEQ ID NO: 35507 - RNA, 20 nt, Artificial Sequence
  Guide RNA
ccagacuauagaaagaagua

SEQ ID NO: 35508 - RNA, 20 nt, Artificial Sequence
  Guide RNA
ccaguaaacauggccccaag

SEQ ID NO: 35509 - RNA, 20 nt, Artificial Sequence
  Guide RNA
ccaguacuuuuaagguguaa

SEQ ID NO: 35510 - RNA, 20 nt, Artificial Sequence
  Guide RNA
ccaguggccauugauggaau

SEQ ID NO: 35511 - RNA, 20 nt, Artificial Sequence
  Guide RNA
ccaucaauggccacuggaau

SEQ ID NO: 35512 - RNA, 20 nt, Artificial Sequence
  Guide RNA
ccaugaacacugucaugcac

SEQ ID NO: 35513 - RNA, 20 nt, Artificial Sequence
  Guide RNA
ccauguuuacuggaagauga

SEQ ID NO: 35514 - RNA, 20 nt, Artificial Sequence
  Guide RNA
ccauugauggaauucaucuu

SEQ ID NO: 35515 - RNA, 20 nt, Artificial Sequence
  Guide RNA
cccaagucacuuaaucaacc

SEQ ID NO: 35516 - RNA, 20 nt, Artificial Sequence
  Guide RNA
ccccaagucacuuaaucaac

SEQ ID NO: 35517 - RNA, 20 nt, Artificial Sequence
  Guide RNA
cccccuucagagauagucac

SEQ ID NO: 35518 - RNA, 20 nt, Artificial Sequence
  Guide RNA
ccccuguugacuuuuccccc

SEQ ID NO: 35519 - RNA, 20 nt, Artificial Sequence
  Guide RNA
ccccuuaauuuuacuaccuu

SEQ ID NO: 35520 - RNA, 20 nt, Artificial Sequence
  Guide RNA
ccccuucagagauagucacc

SEQ ID NO: 35521 - RNA, 20 nt, Artificial Sequence
  Guide RNA
cccuguugacuuuucccccu

SEQ ID NO: 35522 - RNA, 20 nt, Artificial Sequence
  Guide RNA
cccuuaauuuuacuaccuuc

SEQ ID NO: 35523 - RNA, 20 nt, Artificial Sequence
  Guide RNA
cccuucacuuucuaugucaa

SEQ ID NO: 35524 - RNA, 20 nt, Artificial Sequence
  Guide RNA
cccuucagagauagucacca

SEQ ID NO: 35525 - RNA, 20 nt, Artificial Sequence
  Guide RNA
ccgauuauuuuccaacuuag

SEQ ID NO: 35526 - RNA, 20 nt, Artificial Sequence
  Guide RNA
ccguaacuuguccaaagcau

SEQ ID NO: 35527 - RNA, 20 nt, Artificial Sequence
  Guide RNA
ccuaaaugcuuuggacaagu

SEQ ID NO: 35528 - RNA, 20 nt, Artificial Sequence
  Guide RNA
ccuaaguuggaaaauaaucg

SEQ ID NO: 35529 - RNA, 20 nt, Artificial Sequence
  Guide RNA
ccuaggagauuuaacauuua

SEQ ID NO: 35530 - RNA, 20 nt, Artificial Sequence
  Guide RNA
ccugaaaguauuugacauag

SEQ ID NO: 35531 - RNA, 20 nt, Artificial Sequence
  Guide RNA
ccuguugacuuuucccccuu

SEQ ID NO: 35532 - RNA, 20 nt, Artificial Sequence
  Guide RNA
ccuuaaaaguacugguugau

SEQ ID NO: 35533 - RNA, 20 nt, Artificial Sequence
  Guide RNA
ccuuaauuuuacuaccuucu

SEQ ID NO: 35534 - RNA, 20 nt, Artificial Sequence
  Guide RNA
ccuucacuuucuaugucaaa

SEQ ID NO: 35535 - RNA, 20 nt, Artificial Sequence
  Guide RNA
ccuucagagauagucaccau

SEQ ID NO: 35536 - RNA, 20 nt, Artificial Sequence
  Guide RNA
ccuucuucauauuucuaauc

SEQ ID NO: 35537 - RNA, 20 nt, Artificial Sequence
  Guide RNA
cgauuauuuuccaacuuagg

SEQ ID NO: 35538 - RNA, 20 nt, Artificial Sequence
  Guide RNA
cggaauacugacaccgauua

SEQ ID NO: 35539 - RNA, 20 nt, Artificial Sequence
  Guide RNA
cggugucaguauuccguaac

SEQ ID NO: 35540 - RNA, 20 nt, Artificial Sequence
  Guide RNA
cguaacuuguccaaagcauu

SEQ ID NO: 35541 - RNA, 20 nt, Artificial Sequence
  Guide RNA
cguccugaaaguauuugaca

SEQ ID NO: 35542 - RNA, 20 nt, Artificial Sequence
  Guide RNA
cuaaaagcaaugucaguuuc

SEQ ID NO: 35543 - RNA, 20 nt, Artificial Sequence
  Guide RNA
cuaaacucuaagagauugug

SEQ ID NO: 35544 - RNA, 20 nt, Artificial Sequence
  Guide RNA
cuaaaugcuuuggacaaguu

SEQ ID NO: 35545 - RNA, 20 nt, Artificial Sequence
  Guide RNA
cuaagagauugugcaugaca

SEQ ID NO: 35546 - RNA, 20 nt, Artificial Sequence
  Guide RNA
cuaaguuggaaaauaaucgg

SEQ ID NO: 35547 - RNA, 20 nt, Artificial Sequence
  Guide RNA
cuaauugcacauaagagaaa

SEQ ID NO: 35548 - RNA, 20 nt, Artificial Sequence
  Guide RNA
cuaauuuaaaaacguccuga

SEQ ID NO: 35549 - RNA, 20 nt, Artificial Sequence
  Guide RNA
cuacaacaaauaauuccagu

SEQ ID NO: 35550 - RNA, 20 nt, Artificial Sequence
  Guide RNA
cuaccuucuucauauuucua

SEQ ID NO: 35551 - RNA, 20 nt, Artificial Sequence
  Guide RNA
cuagaacuaaaugucuaugu

SEQ ID NO: 35552 - RNA, 20 nt, Artificial Sequence
  Guide RNA
cuagacagaagaagaaguuu

SEQ ID NO: 35553 - RNA, 20 nt, Artificial Sequence
  Guide RNA
cuaggagauuuaacauuuac

SEQ ID NO: 35554 - RNA, 20 nt, Artificial Sequence
  Guide RNA
cuauagucuggauccuaagu

SEQ ID NO: 35555 - RNA, 20 nt, Artificial Sequence
  Guide RNA
cuaucucugaagggggaaaa

SEQ ID NO: 35556 - RNA, 20 nt, Artificial Sequence
  Guide RNA
cuauguaaaacagacaaaac

SEQ ID NO: 35557 - RNA, 20 nt, Artificial Sequence
  Guide RNA
cuaugucaaauacuuucagg

SEQ ID NO: 35558 - RNA, 20 nt, Artificial Sequence
  Guide RNA
cucaacaaaguugagccaaa

SEQ ID NO: 35559 - RNA, 20 nt, Artificial Sequence
  Guide RNA
cucaacuuuguugagucauu

SEQ ID NO: 35560 - RNA, 20 nt, Artificial Sequence
  Guide RNA
cucuaagagauugugcauga

SEQ ID NO: 35561 - RNA, 20 nt, Artificial Sequence
  Guide RNA
cucugaagggggaaaaguca

SEQ ID NO: 35562 - RNA, 20 nt, Artificial Sequence
  Guide RNA
cucuuaugugcaauuagcac

SEQ ID NO: 35563 - RNA, 20 nt, Artificial Sequence
  Guide RNA
cugaaaguauuugacauaga

SEQ ID NO: 35564 - RNA, 20 nt, Artificial Sequence
  Guide RNA
cugaagggggaaaagucaac

SEQ ID NO: 35565 - RNA, 20 nt, Artificial Sequence
  Guide RNA
cugacaccgauuauuuucca

SEQ ID NO: 35566 - RNA, 20 nt, Artificial Sequence
  Guide RNA
cugacauugcuuuuagcagc

SEQ ID NO: 35567 - RNA, 20 nt, Artificial Sequence
  Guide RNA
cugauagguguucuacuuua

SEQ ID NO: 35568 - RNA, 20 nt, Artificial Sequence
  Guide RNA
cugcuaaaagcaaugucagu

SEQ ID NO: 35569 - RNA, 20 nt, Artificial Sequence
  Guide RNA
cugcugcuaaaagcaauguc

SEQ ID NO: 35570 - RNA, 20 nt, Artificial Sequence
  Guide RNA
cuggaagaugaauuccauca

SEQ ID NO: 35571 - RNA, 20 nt, Artificial Sequence
  Guide RNA
cuggaauuauuuguuguaga

SEQ ID NO: 35572 - RNA, 20 nt, Artificial Sequence
  Guide RNA
cuggauccuaaguuggaaaa

SEQ ID NO: 35573 - RNA, 20 nt, Artificial Sequence
  Guide RNA
cugguugauuaagugacuug

SEQ ID NO: 35574 - RNA, 20 nt, Artificial Sequence
  Guide RNA
cuguauaaaagugcuuaaug

SEQ ID NO: 35575 - RNA, 20 nt, Artificial Sequence
  Guide RNA
cugucaugcacaaucucuua

SEQ ID NO: 35576 - RNA, 20 nt, Artificial Sequence
  Guide RNA
cuguugacuuuucccccuuc

SEQ ID NO: 35577 - RNA, 20 nt, Artificial Sequence
  Guide RNA
cuuaaaaguacugguugauu

SEQ ID NO: 35578 - RNA, 20 nt, Artificial Sequence
  Guide RNA
cuuaacuuuguugagacacu

SEQ ID NO: 35579 - RNA, 20 nt, Artificial Sequence
  Guide RNA
cuuaaucaaccaguacuuuu

SEQ ID NO: 35580 - RNA, 20 nt, Artificial Sequence
  Guide RNA
cuuaggauccagacuauaga

SEQ ID NO: 35581 - RNA, 20 nt, Artificial Sequence
  Guide RNA
cuuaugugcaauuagcacaa

SEQ ID NO: 35582 - RNA, 20 nt, Artificial Sequence
  Guide RNA
cuucacuuucuaugucaaau

SEQ ID NO: 35583 - RNA, 20 nt, Artificial Sequence
  Guide RNA
cuucagagauagucaccaug

SEQ ID NO: 35584 - RNA, 20 nt, Artificial Sequence
  Guide RNA
cuuccaguaaacauggcccc

SEQ ID NO: 35585 - RNA, 20 nt, Artificial Sequence
  Guide RNA
cuucugucuagugaauuuuc

SEQ ID NO: 35586 - RNA, 20 nt, Artificial Sequence
  Guide RNA
cuucuucugucuagugaauu

SEQ ID NO: 35587 - RNA, 20 nt, Artificial Sequence
  Guide RNA
cuucuucuucugucuaguga

SEQ ID NO: 35588 - RNA, 20 nt, Artificial Sequence
  Guide RNA
cuucuuucuauagucuggau

SEQ ID NO: 35589 - RNA, 20 nt, Artificial Sequence
  Guide RNA
cuucuuuugaaacugacauu

SEQ ID NO: 35590 - RNA, 20 nt, Artificial Sequence
  Guide RNA
cuuggggccauguuuacugg

SEQ ID NO: 35591 - RNA, 20 nt, Artificial Sequence
  Guide RNA
cuuguccaaagcauuuagga

SEQ ID NO: 35592 - RNA, 20 nt, Artificial Sequence
  Guide RNA
cuuucaggacguuuuuaaau

SEQ ID NO: 35593 - RNA, 20 nt, Artificial Sequence
  Guide RNA
cuuucuauagucuggauccu

SEQ ID NO: 35594 - RNA, 20 nt, Artificial Sequence
  Guide RNA
cuuuggacaaguuacggaau

SEQ ID NO: 35595 - RNA, 20 nt, Artificial Sequence
  Guide RNA
cuuuguugagacacuuuuug

SEQ ID NO: 35596 - RNA, 20 nt, Artificial Sequence
  Guide RNA
cuuuuaagguguaaacuucu

SEQ ID NO: 35597 - RNA, 20 nt, Artificial Sequence
  Guide RNA
cuuuuagcagcaguuuaugu

SEQ ID NO: 35598 - RNA, 20 nt, Artificial Sequence
  Guide RNA
cuuuuauacaguuuugccaa

SEQ ID NO: 35599 - RNA, 20 nt, Artificial Sequence
  Guide RNA
cuuuucccccuucagagaua

SEQ ID NO: 35600 - RNA, 20 nt, Artificial Sequence
  Guide RNA
cuuuugaaacugacauugcu

SEQ ID NO: 35601 - RNA, 20 nt, Artificial Sequence
  Guide RNA
cuuuuuggcucaacuuuguu

SEQ ID NO: 35602 - RNA, 20 nt, Artificial Sequence
  Guide RNA
gaaaagucaacaggggaccc

SEQ ID NO: 35603 - RNA, 20 nt, Artificial Sequence
  Guide RNA
gaaaauaaucggugucagua

SEQ ID NO: 35604 - RNA, 20 nt, Artificial Sequence
  Guide RNA
gaaaauucacuagacagaag

SEQ ID NO: 35605 - RNA, 20 nt, Artificial Sequence
  Guide RNA
gaaaccaacauuuguuuugu

SEQ ID NO: 35606 - RNA, 20 nt, Artificial Sequence
  Guide RNA
gaaacugacauugcuuuuag

SEQ ID NO: 35607 - RNA, 20 nt, Artificial Sequence
  Guide RNA
gaaagugaaggguccccugu

SEQ ID NO: 35608 - RNA, 20 nt, Artificial Sequence
  Guide RNA
gaaauaccacauaaacugcu

SEQ ID NO: 35609 - RNA, 20 nt, Artificial Sequence
  Guide RNA
gaaauaugaagaagguagua

SEQ ID NO: 35610 - RNA, 20 nt, Artificial Sequence
  Guide RNA
gaacaccuaucaguuaaaaa

SEQ ID NO: 35611 - RNA, 20 nt, Artificial Sequence
  Guide RNA
gaacacugucaugcacaauc

SEQ ID NO: 35612 - RNA, 20 nt, Artificial Sequence
  Guide RNA
gaagaagaaguuuacaccuu

SEQ ID NO: 35613 - RNA, 20 nt, Artificial Sequence
  Guide RNA
gaagaaguuuacaccuuaaa

SEQ ID NO: 35614 - RNA, 20 nt, Artificial Sequence
  Guide RNA
gaagaugaauuccaucaaug

SEQ ID NO: 35615 - RNA, 20 nt, Artificial Sequence
  Guide RNA
gaagggggaaaagucaacag

SEQ ID NO: 35616 - RNA, 20 nt, Artificial Sequence
  Guide RNA
gaaggguccccuguugacuu

SEQ ID NO: 35617 - RNA, 20 nt, Artificial Sequence
  Guide RNA
gaagguaguaaaauuaaggg

SEQ ID NO: 35618 - RNA, 20 nt, Artificial Sequence
  Guide RNA
gaaguuuacaccuuaaaagu

SEQ ID NO: 35619 - RNA, 20 nt, Artificial Sequence
  Guide RNA
gaauacugacaccgauuauu

SEQ ID NO: 35620 - RNA, 20 nt, Artificial Sequence
  Guide RNA
gaauucaucuuccaguaaac

SEQ ID NO: 35621 - RNA, 20 nt, Artificial Sequence
  Guide RNA
gaauuccaucaauggccacu

SEQ ID NO: 35622 - RNA, 20 nt, Artificial Sequence
  Guide RNA
gaauuuuuugugcuaauugc

SEQ ID NO: 35623 - RNA, 20 nt, Artificial Sequence
  Guide RNA
gacaaaacaaauguugguuu

SEQ ID NO: 35624 - RNA, 20 nt, Artificial Sequence
  Guide RNA
gacaaguuacggaauacuga

SEQ ID NO: 35625 - RNA, 20 nt, Artificial Sequence
  Guide RNA
gacaccgauuauuuuccaac

SEQ ID NO: 35626 - RNA, 20 nt, Artificial Sequence
  Guide RNA
gacacuuuuuggcucaacuu

SEQ ID NO: 35627 - RNA, 20 nt, Artificial Sequence
  Guide RNA
gacagaagaagaaguuuaca

SEQ ID NO: 35628 - RNA, 20 nt, Artificial Sequence
  Guide RNA
gacaguguucauggugacua

SEQ ID NO: 35629 - RNA, 20 nt, Artificial Sequence
  Guide RNA
gacauagaaagugaaggguc

SEQ ID NO: 35630 - RNA, 20 nt, Artificial Sequence
  Guide RNA
gacauugcuuuuagcagcag

SEQ ID NO: 35631 - RNA, 20 nt, Artificial Sequence
  Guide RNA
gacauuuaguucuagaauga

SEQ ID NO: 35632 - RNA, 20 nt, Artificial Sequence
  Guide RNA
gacccuucacuuucuauguc

SEQ ID NO: 35633 - RNA, 20 nt, Artificial Sequence
  Guide RNA
gacuaucucugaagggggaa

SEQ ID NO: 35634 - RNA, 20 nt, Artificial Sequence
  Guide RNA
gacucaacaaaguugagcca

SEQ ID NO: 35635 - RNA, 20 nt, Artificial Sequence
  Guide RNA
gacuuggggccauguuuacu

SEQ ID NO: 35636 - RNA, 20 nt, Artificial Sequence
  Guide RNA
gacuuuucccccuucagaga

SEQ ID NO: 35637 - RNA, 20 nt, Artificial Sequence
  Guide RNA
gagaaauaccacauaaacug

SEQ ID NO: 35638 - RNA, 20 nt, Artificial Sequence
  Guide RNA
gagacacuuuuuggcucaac

SEQ ID NO: 35639 - RNA, 20 nt, Artificial Sequence
  Guide RNA
gagauagucaccaugaacac

SEQ ID NO: 35640 - RNA, 20 nt, Artificial Sequence
  Guide RNA
gagauugugcaugacagugu

SEQ ID NO: 35641 - RNA, 20 nt, Artificial Sequence
  Guide RNA
gagccaaaaagugucucaac

SEQ ID NO: 35642 - RNA, 20 nt, Artificial Sequence
  Guide RNA
gaguuuagaauuuuuugugc

SEQ ID NO: 35643 - RNA, 20 nt, Artificial Sequence
  Guide RNA
gauagauauuccuaaaugcu

SEQ ID NO: 35644 - RNA, 20 nt, Artificial Sequence
  Guide RNA
gauagguguucuacuuuaaa

SEQ ID NO: 35645 - RNA, 20 nt, Artificial Sequence
  Guide RNA
gauagucaccaugaacacug

SEQ ID NO: 35646 - RNA, 20 nt, Artificial Sequence
  Guide RNA
gauauuccuaaaugcuuugg

SEQ ID NO: 35647 - RNA, 20 nt, Artificial Sequence
  Guide RNA
gauccagacuauagaaagaa

SEQ ID NO: 35648 - RNA, 20 nt, Artificial Sequence
  Guide RNA
gauccuaaguuggaaaauaa

SEQ ID NO: 35649 - RNA, 20 nt, Artificial Sequence
  Guide RNA
gaugaauuccaucaauggcc

SEQ ID NO: 35650 - RNA, 20 nt, Artificial Sequence
  Guide RNA
gauggaauucaucuuccagu

SEQ ID NO: 35651 - RNA, 20 nt, Artificial Sequence
  Guide RNA
gauuaagugacuuggggcca

SEQ ID NO: 35652 - RNA, 20 nt, Artificial Sequence
  Guide RNA
gauuagaaauaugaagaagg

SEQ ID NO: 35653 - RNA, 20 nt, Artificial Sequence
  Guide RNA
gauuauuuuccaacuuagga

SEQ ID NO: 35654 - RNA, 20 nt, Artificial Sequence
  Guide RNA
gauugugcaugacaguguuc

SEQ ID NO: 35655 - RNA, 20 nt, Artificial Sequence
  Guide RNA
gcaaaacuguauaaaagugc

SEQ ID NO: 35656 - RNA, 20 nt, Artificial Sequence
  Guide RNA
gcaaugucaguuucaaaaga

SEQ ID NO: 35657 - RNA, 20 nt, Artificial Sequence
  Guide RNA
gcaauuagcacaaaaaauuc

SEQ ID NO: 35658 - RNA, 20 nt, Artificial Sequence
  Guide RNA
gcacaaaaaauucuaaacuc

SEQ ID NO: 35659 - RNA, 20 nt, Artificial Sequence
  Guide RNA
gcacaaucucuuagaguuua

SEQ ID NO: 35660 - RNA, 20 nt, Artificial Sequence
  Guide RNA
gcacauaagagaaauaccac

SEQ ID NO: 35661 - RNA, 20 nt, Artificial Sequence
  Guide RNA
gcacuuuuauacaguuuugc

SEQ ID NO: 35662 - RNA, 20 nt, Artificial Sequence
  Guide RNA
gcagcaguuuaugugguauu

SEQ ID NO: 35663 - RNA, 20 nt, Artificial Sequence
  Guide RNA
gcaguuuaugugguauuucu

SEQ ID NO: 35664 - RNA, 20 nt, Artificial Sequence
  Guide RNA
gcaugacaguguucauggug

SEQ ID NO: 35665 - RNA, 20 nt, Artificial Sequence
  Guide RNA
gcauuuaggaauaucuauca

SEQ ID NO: 35666 - RNA, 20 nt, Artificial Sequence
  Guide RNA
gccaaaaagugucucaacaa

SEQ ID NO: 35667 - RNA, 20 nt, Artificial Sequence
  Guide RNA
gccaaauuaaugguuaaaca

SEQ ID NO: 35668 - RNA, 20 nt, Artificial Sequence
  Guide RNA
gccacuggaauuauuuguug

SEQ ID NO: 35669 - RNA, 20 nt, Artificial Sequence
  Guide RNA
gccauguuuacuggaagaug

SEQ ID NO: 35670 - RNA, 20 nt, Artificial Sequence
  Guide RNA
gccauugauggaauucaucu

SEQ ID NO: 35671 - RNA, 20 nt, Artificial Sequence
  Guide RNA
gccccaagucacuuaaucaa

SEQ ID NO: 35672 - RNA, 20 nt, Artificial Sequence
  Guide RNA
gcuaaaagcaaugucaguuu

SEQ ID NO: 35673 - RNA, 20 nt, Artificial Sequence
  Guide RNA
gcuaauugcacauaagagaa

SEQ ID NO: 35674 - RNA, 20 nt, Artificial Sequence
  Guide RNA
gcuaauuuaaaaacguccug

SEQ ID NO: 35675 - RNA, 20 nt, Artificial Sequence
  Guide RNA
gcucaacuuuguugagucau

SEQ ID NO: 35676 - RNA, 20 nt, Artificial Sequence
  Guide RNA
gcugcuaaaagcaaugucag

SEQ ID NO: 35677 - RNA, 20 nt, Artificial Sequence
  Guide RNA
gcuuuggacaaguuacggaa

SEQ ID NO: 35678 - RNA, 20 nt, Artificial Sequence
  Guide RNA
gcuuuuagcagcaguuuaug

SEQ ID NO: 35679 - RNA, 20 nt, Artificial Sequence
  Guide RNA
ggaaaagucaacaggggacc

SEQ ID NO: 35680 - RNA, 20 nt, Artificial Sequence
  Guide RNA
ggaaaauaaucggugucagu

SEQ ID NO: 35681 - RNA, 20 nt, Artificial Sequence
  Guide RNA
ggaaaauucacuagacagaa

SEQ ID NO: 35682 - RNA, 20 nt, Artificial Sequence
  Guide RNA
ggaaaccaacauuuguuuug

SEQ ID NO: 35683 - RNA, 20 nt, Artificial Sequence
  Guide RNA
ggaagaugaauuccaucaau

SEQ ID NO: 35684 - RNA, 20 nt, Artificial Sequence
  Guide RNA
ggaauacugacaccgauuau

SEQ ID NO: 35685 - RNA, 20 nt, Artificial Sequence
  Guide RNA
ggaauucaucuuccaguaaa

SEQ ID NO: 35686 - RNA, 20 nt, Artificial Sequence
  Guide RNA
ggacaaguuacggaauacug

SEQ ID NO: 35687 - RNA, 20 nt, Artificial Sequence
  Guide RNA
ggacccuucacuuucuaugu

SEQ ID NO: 35688 - RNA, 20 nt, Artificial Sequence
  Guide RNA
ggagauuuaacauuuacaca

SEQ ID NO: 35689 - RNA, 20 nt, Artificial Sequence
  Guide RNA
ggauccagacuauagaaaga

SEQ ID NO: 35690 - RNA, 20 nt, Artificial Sequence
  Guide RNA
ggauccuaaguuggaaaaua

SEQ ID NO: 35691 - RNA, 20 nt, Artificial Sequence
  Guide RNA
ggcaaaacuguauaaaagug

SEQ ID NO: 35692 - RNA, 20 nt, Artificial Sequence
  Guide RNA
ggccacuggaauuauuuguu

SEQ ID NO: 35693 - RNA, 20 nt, Artificial Sequence
  Guide RNA
ggccauguuuacuggaagau

SEQ ID NO: 35694 - RNA, 20 nt, Artificial Sequence
  Guide RNA
ggccauugauggaauucauc

SEQ ID NO: 35695 - RNA, 20 nt, Artificial Sequence
  Guide RNA
ggccccaagucacuuaauca

SEQ ID NO: 35696 - RNA, 20 nt, Artificial Sequence
  Guide RNA
ggcucaacuuuguugaguca

SEQ ID NO: 35697 - RNA, 20 nt, Artificial Sequence
  Guide RNA
gggaaaagucaacaggggac

SEQ ID NO: 35698 - RNA, 20 nt, Artificial Sequence
  Guide RNA
gggacccuucacuuucuaug

SEQ ID NO: 35699 - RNA, 20 nt, Artificial Sequence
  Guide RNA
gggccauguuuacuggaaga

SEQ ID NO: 35700 - RNA, 20 nt, Artificial Sequence
  Guide RNA
ggggaaaagucaacagggga

SEQ ID NO: 35701 - RNA, 20 nt, Artificial Sequence
  Guide RNA
ggggacccuucacuuucuau

SEQ ID NO: 35702 - RNA, 20 nt, Artificial Sequence
  Guide RNA
ggggccauguuuacuggaag

SEQ ID NO: 35703 - RNA, 20 nt, Artificial Sequence
  Guide RNA
gggggaaaagucaacagggg

SEQ ID NO: 35704 - RNA, 20 nt, Artificial Sequence
  Guide RNA
ggguccccuguugacuuuuc

SEQ ID NO: 35705 - RNA, 20 nt, Artificial Sequence
  Guide RNA
gguaguaaaauuaaggggau

SEQ ID NO: 35706 - RNA, 20 nt, Artificial Sequence
  Guide RNA
gguauuucucuuaugugcaa

SEQ ID NO: 35707 - RNA, 20 nt, Artificial Sequence
  Guide RNA
gguccccuguugacuuuucc

SEQ ID NO: 35708 - RNA, 20 nt, Artificial Sequence
  Guide RNA
ggugacuaucucugaagggg

SEQ ID NO: 35709 - RNA, 20 nt, Artificial Sequence
  Guide RNA
gguguaaacuucuucuucug

SEQ ID NO: 35710 - RNA, 20 nt, Artificial Sequence
  Guide RNA
ggugucaguauuccguaacu

SEQ ID NO: 35711 - RNA, 20 nt, Artificial Sequence
  Guide RNA
gguugauuaagugacuuggg

SEQ ID NO: 35712 - RNA, 20 nt, Artificial Sequence
  Guide RNA
guaaacauggccccaaguca

SEQ ID NO: 35713 - RNA, 20 nt, Artificial Sequence
  Guide RNA
guaaacuucuucuucugucu

SEQ ID NO: 35714 - RNA, 20 nt, Artificial Sequence
  Guide RNA
guaacuuguccaaagcauuu

SEQ ID NO: 35715 - RNA, 20 nt, Artificial Sequence
  Guide RNA
guaaggaaaauucacuagac

SEQ ID NO: 35716 - RNA, 20 nt, Artificial Sequence
  Guide RNA
guacugguugauuaagugac

SEQ ID NO: 35717 - RNA, 20 nt, Artificial Sequence
  Guide RNA
guacuuuuaagguguaaacu

SEQ ID NO: 35718 - RNA, 20 nt, Artificial Sequence
  Guide RNA
guagaacaccuaucaguuaa

SEQ ID NO: 35719 - RNA, 20 nt, Artificial Sequence
  Guide RNA
guaguaaaauuaaggggauu

SEQ ID NO: 35720 - RNA, 20 nt, Artificial Sequence
  Guide RNA
guauaaaagugcuuaaugac

SEQ ID NO: 35721 - RNA, 20 nt, Artificial Sequence
  Guide RNA
guauauuagucauuaagcac

SEQ ID NO: 35722 - RNA, 20 nt, Artificial Sequence
  Guide RNA
guauuccguaacuuguccaa

SEQ ID NO: 35723 - RNA, 20 nt, Artificial Sequence
  Guide RNA
guauuucucuuaugugcaau

SEQ ID NO: 35724 - RNA, 20 nt, Artificial Sequence
  Guide RNA
guauuugacauagaaaguga

SEQ ID NO: 35725 - RNA, 20 nt, Artificial Sequence
  Guide RNA
gucaaauacuuucaggacgu

SEQ ID NO: 35726 - RNA, 20 nt, Artificial Sequence
  Guide RNA
gucaacaggggacccuucac

SEQ ID NO: 35727 - RNA, 20 nt, Artificial Sequence
  Guide RNA
gucaccaugaacacugucau

SEQ ID NO: 35728 - RNA, 20 nt, Artificial Sequence
  Guide RNA
gucacuuaaucaaccaguac

SEQ ID NO: 35729 - RNA, 20 nt, Artificial Sequence
  Guide RNA
gucaguauuccguaacuugu

SEQ ID NO: 35730 - RNA, 20 nt, Artificial Sequence
  Guide RNA
gucaguuucaaaagaagaaa

SEQ ID NO: 35731 - RNA, 20 nt, Artificial Sequence
  Guide RNA
gucaugcacaaucucuuaga

SEQ ID NO: 35732 - RNA, 20 nt, Artificial Sequence
  Guide RNA
gucauuaagcacuuuuauac

SEQ ID NO: 35733 - RNA, 20 nt, Artificial Sequence
  Guide RNA
guccaaagcauuuaggaaua

SEQ ID NO: 35734 - RNA, 20 nt, Artificial Sequence
  Guide RNA
guccccuguugacuuuuccc

SEQ ID NO: 35735 - RNA, 20 nt, Artificial Sequence
  Guide RNA
guccugaaaguauuugacau

SEQ ID NO: 35736 - RNA, 20 nt, Artificial Sequence
  Guide RNA
gucuauguaaaacagacaaa

SEQ ID NO: 35737 - RNA, 20 nt, Artificial Sequence
  Guide RNA
gucucaacaaaguuaaguau

SEQ ID NO: 35738 - RNA, 20 nt, Artificial Sequence
  Guide RNA
gucuggauccuaaguuggaa

SEQ ID NO: 35739 - RNA, 20 nt, Artificial Sequence
  Guide RNA
gucuguuuuacauagacauu

SEQ ID NO: 35740 - RNA, 20 nt, Artificial Sequence
  Guide RNA
gugaaggguccccuguugac

SEQ ID NO: 35741 - RNA, 20 nt, Artificial Sequence
  Guide RNA
gugacuaucucugaaggggg

SEQ ID NO: 35742 - RNA, 20 nt, Artificial Sequence
  Guide RNA
gugacuuggggccauguuua

SEQ ID NO: 35743 - RNA, 20 nt, Artificial Sequence
  Guide RNA
gugcaauuagcacaaaaaau

SEQ ID NO: 35744 - RNA, 20 nt, Artificial Sequence
  Guide RNA
gugcaugacaguguucaugg

SEQ ID NO: 35745 - RNA, 20 nt, Artificial Sequence
  Guide RNA
gugcuaauugcacauaagag

SEQ ID NO: 35746 - RNA, 20 nt, Artificial Sequence
  Guide RNA
gugcuuaaugacuaauauac

SEQ ID NO: 35747 - RNA, 20 nt, Artificial Sequence
  Guide RNA
guggccauugauggaauuca

SEQ ID NO: 35748 - RNA, 20 nt, Artificial Sequence
  Guide RNA
gugguauuucucuuaugugc

SEQ ID NO: 35749 - RNA, 20 nt, Artificial Sequence
  Guide RNA
guguaaacuucuucuucugu

SEQ ID NO: 35750 - RNA, 20 nt, Artificial Sequence
  Guide RNA
gugucaguauuccguaacuu

SEQ ID NO: 35751 - RNA, 20 nt, Artificial Sequence
  Guide RNA
gugucucaacaaaguuaagu

SEQ ID NO: 35752 - RNA, 20 nt, Artificial Sequence
  Guide RNA
guguucauggugacuaucuc

SEQ ID NO: 35753 - RNA, 20 nt, Artificial Sequence
  Guide RNA
guuacggaauacugacaccg

SEQ ID NO: 35754 - RNA, 20 nt, Artificial Sequence
  Guide RNA
guucauggugacuaucucug

SEQ ID NO: 35755 - RNA, 20 nt, Artificial Sequence
  Guide RNA
guucuagaaugaaaugugua

SEQ ID NO: 35756 - RNA, 20 nt, Artificial Sequence
  Guide RNA
guugacuuuucccccuucag

SEQ ID NO: 35757 - RNA, 20 nt, Artificial Sequence
  Guide RNA
guugagacacuuuuuggcuc

SEQ ID NO: 35758 - RNA, 20 nt, Artificial Sequence
  Guide RNA
guugagccaaaaagugucuc

SEQ ID NO: 35759 - RNA, 20 nt, Artificial Sequence
  Guide RNA
guugauuaagugacuugggg

SEQ ID NO: 35760 - RNA, 20 nt, Artificial Sequence
  Guide RNA
guuggaaaauaaucgguguc

SEQ ID NO: 35761 - RNA, 20 nt, Artificial Sequence
  Guide RNA
guugguuuccuuauugaaau

SEQ ID NO: 35762 - RNA, 20 nt, Artificial Sequence
  Guide RNA
guuguagaaaaguuuguuga

SEQ ID NO: 35763 - RNA, 20 nt, Artificial Sequence
  Guide RNA
guuuaaccauuaauuuggcu

SEQ ID NO: 35764 - RNA, 20 nt, Artificial Sequence
  Guide RNA
guuuacaccuuaaaaguacu

SEQ ID NO: 35765 - RNA, 20 nt, Artificial Sequence
  Guide RNA
guuuacuggaagaugaauuc

SEQ ID NO: 35766 - RNA, 20 nt, Artificial Sequence
  Guide RNA
guuuaugugguauuucucuu

SEQ ID NO: 35767 - RNA, 20 nt, Artificial Sequence
  Guide RNA
guuuugucuguuuuacauag

SEQ ID NO: 35768 - RNA, 20 nt, Artificial Sequence
  Guide RNA
uaaaaacguccugaaaguau

SEQ ID NO: 35769 - RNA, 20 nt, Artificial Sequence
  Guide RNA
uaaaagcaaugucaguuuca

SEQ ID NO: 35770 - RNA, 20 nt, Artificial Sequence
  Guide RNA
uaaacauggccccaagucac

SEQ ID NO: 35771 - RNA, 20 nt, Artificial Sequence
  Guide RNA
uaaacucuaagagauugugc

SEQ ID NO: 35772 - RNA, 20 nt, Artificial Sequence
  Guide RNA
uaaacugcugcuaaaagcaa

SEQ ID NO: 35773 - RNA, 20 nt, Artificial Sequence
  Guide RNA
uaaacuucuucuucugucua

SEQ ID NO: 35774 - RNA, 20 nt, Artificial Sequence
  Guide RNA
uaaaguagaacaccuaucag

SEQ ID NO: 35775 - RNA, 20 nt, Artificial Sequence
  Guide RNA
uaaaugcuuuggacaaguua

SEQ ID NO: 35776 - RNA, 20 nt, Artificial Sequence
  Guide RNA
uaacugauagguguucuacu

SEQ ID NO: 35777 - RNA, 20 nt, Artificial Sequence
  Guide RNA
uaacuuguccaaagcauuua

SEQ ID NO: 35778 - RNA, 20 nt, Artificial Sequence
  Guide RNA
uaacuuuguugagacacuuu

SEQ ID NO: 35779 - RNA, 20 nt, Artificial Sequence
  Guide RNA
uaagagauugugcaugacag

SEQ ID NO: 35780 - RNA, 20 nt, Artificial Sequence
  Guide RNA
uaaggaaaauucacuagaca

SEQ ID NO: 35781 - RNA, 20 nt, Artificial Sequence
  Guide RNA
uaaggaaaccaacauuuguu

SEQ ID NO: 35782 - RNA, 20 nt, Artificial Sequence
  Guide RNA
uaagguguaaacuucuucuu

SEQ ID NO: 35783 - RNA, 20 nt, Artificial Sequence
  Guide RNA
uaagugacuuggggccaugu

SEQ ID NO: 35784 - RNA, 20 nt, Artificial Sequence
  Guide RNA
uaaguuggaaaauaaucggu

SEQ ID NO: 35785 - RNA, 20 nt, Artificial Sequence
  Guide RNA
uaaucggugucaguauuccg

SEQ ID NO: 35786 - RNA, 20 nt, Artificial Sequence
  Guide RNA
uaauuccaguggccauugau

SEQ ID NO: 35787 - RNA, 20 nt, Artificial Sequence
  Guide RNA
uacaacaaauaauuccagug

SEQ ID NO: 35788 - RNA, 20 nt, Artificial Sequence
  Guide RNA
uacacauuucauucuagaac

SEQ ID NO: 35789 - RNA, 20 nt, Artificial Sequence
  Guide RNA
uacaccuuaaaaguacuggu

SEQ ID NO: 35790 - RNA, 20 nt, Artificial Sequence
  Guide RNA
uaccacauaaacugcugcua

SEQ ID NO: 35791 - RNA, 20 nt, Artificial Sequence
  Guide RNA
uacggaauacugacaccgau

SEQ ID NO: 35792 - RNA, 20 nt, Artificial Sequence
  Guide RNA
uacuaccuucuucauauuuc

SEQ ID NO: 35793 - RNA, 20 nt, Artificial Sequence
  Guide RNA
uacugacaccgauuauuuuc

SEQ ID NO: 35794 - RNA, 20 nt, Artificial Sequence
  Guide RNA
uacuggaagaugaauuccau

SEQ ID NO: 35795 - RNA, 20 nt, Artificial Sequence
  Guide RNA
uacugguugauuaagugacu

SEQ ID NO: 35796 - RNA, 20 nt, Artificial Sequence
  Guide RNA
uacuuaacuuuguugagaca

SEQ ID NO: 35797 - RNA, 20 nt, Artificial Sequence
  Guide RNA
uacuucuuucuauagucugg

SEQ ID NO: 35798 - RNA, 20 nt, Artificial Sequence
  Guide RNA
uacuuucaggacguuuuuaa

SEQ ID NO: 35799 - RNA, 20 nt, Artificial Sequence
  Guide RNA
uagaaagugaaggguccccu

SEQ ID NO: 35800 - RNA, 20 nt, Artificial Sequence
  Guide RNA
uagaaauaugaagaagguag

SEQ ID NO: 35801 - RNA, 20 nt, Artificial Sequence
  Guide RNA
uagaacaccuaucaguuaaa

SEQ ID NO: 35802 - RNA, 20 nt, Artificial Sequence
  Guide RNA
uagacagaagaagaaguuua

SEQ ID NO: 35803 - RNA, 20 nt, Artificial Sequence
  Guide RNA
uagcagcaguuuauguggua

SEQ ID NO: 35804 - RNA, 20 nt, Artificial Sequence
  Guide RNA
uaggauccagacuauagaaa

SEQ ID NO: 35805 - RNA, 20 nt, Artificial Sequence
  Guide RNA
uagucaccaugaacacuguc

SEQ ID NO: 35806 - RNA, 20 nt, Artificial Sequence
  Guide RNA
uagucuggauccuaaguugg

SEQ ID NO: 35807 - RNA, 20 nt, Artificial Sequence
  Guide RNA
uaguucuagaaugaaaugug

SEQ ID NO: 35808 - RNA, 20 nt, Artificial Sequence
  Guide RNA
uauagucuggauccuaaguu

SEQ ID NO: 35809 - RNA, 20 nt, Artificial Sequence
  Guide RNA
uaucucugaagggggaaaag

SEQ ID NO: 35810 - RNA, 20 nt, Artificial Sequence
  Guide RNA
uaugucaaauacuuucagga

SEQ ID NO: 35811 - RNA, 20 nt, Artificial Sequence
  Guide RNA
uaugugcaauuagcacaaaa

SEQ ID NO: 35812 - RNA, 20 nt, Artificial Sequence
  Guide RNA
uaugugguauuucucuuaug

SEQ ID NO: 35813 - RNA, 20 nt, Artificial Sequence
  Guide RNA
uauuccguaacuuguccaaa

SEQ ID NO: 35814 - RNA, 20 nt, Artificial Sequence
  Guide RNA
uauuccuaaaugcuuuggac

SEQ ID NO: 35815 - RNA, 20 nt, Artificial Sequence
  Guide RNA
uauuuuccaacuuaggaucc

SEQ ID NO: 35816 - RNA, 20 nt, Artificial Sequence
  Guide RNA
ucaaauacuuucaggacguu

SEQ ID NO: 35817 - RNA, 20 nt, Artificial Sequence
  Guide RNA
ucaacaaacuuuucuacaac

SEQ ID NO: 35818 - RNA, 20 nt, Artificial Sequence
  Guide RNA
ucaacaaaguugagccaaaa

SEQ ID NO: 35819 - RNA, 20 nt, Artificial Sequence
  Guide RNA
ucaacaggggacccuucacu

SEQ ID NO: 35820 - RNA, 20 nt, Artificial Sequence
  Guide RNA
ucaaccaguacuuuuaaggu

SEQ ID NO: 35821 - RNA, 20 nt, Artificial Sequence
  Guide RNA
ucaacuuuguugagucauuu

SEQ ID NO: 35822 - RNA, 20 nt, Artificial Sequence
  Guide RNA
ucaauaaggaaaccaacauu

SEQ ID NO: 35823 - RNA, 20 nt, Artificial Sequence
  Guide RNA
ucaauggccacuggaauuau

SEQ ID NO: 35824 - RNA, 20 nt, Artificial Sequence
  Guide RNA
ucaccaugaacacugucaug

SEQ ID NO: 35825 - RNA, 20 nt, Artificial Sequence
  Guide RNA
ucacuagacagaagaagaag

SEQ ID NO: 35826 - RNA, 20 nt, Artificial Sequence
  Guide RNA
ucacuuaaucaaccaguacu

SEQ ID NO: 35827 - RNA, 20 nt, Artificial Sequence
  Guide RNA
ucacuuucuaugucaaauac

SEQ ID NO: 35828 - RNA, 20 nt, Artificial Sequence
  Guide RNA
ucagagauagucaccaugaa

SEQ ID NO: 35829 - RNA, 20 nt, Artificial Sequence
  Guide RNA
ucaguauuccguaacuuguc

SEQ ID NO: 35830 - RNA, 20 nt, Artificial Sequence
  Guide RNA
ucaucuuccaguaaacaugg

SEQ ID NO: 35831 - RNA, 20 nt, Artificial Sequence
  Guide RNA
ucaugcacaaucucuuagag

SEQ ID NO: 35832 - RNA, 20 nt, Artificial Sequence
  Guide RNA
ucauggugacuaucucugaa

SEQ ID NO: 35833 - RNA, 20 nt, Artificial Sequence
  Guide RNA
ucauucuagaacuaaauguc

SEQ ID NO: 35834 - RNA, 20 nt, Artificial Sequence
  Guide RNA
uccaaagcauuuaggaauau

SEQ ID NO: 35835 - RNA, 20 nt, Artificial Sequence
  Guide RNA
uccaacuuaggauccagacu

SEQ ID NO: 35836 - RNA, 20 nt, Artificial Sequence
  Guide RNA
uccagacuauagaaagaagu

SEQ ID NO: 35837 - RNA, 20 nt, Artificial Sequence
  Guide RNA
uccaguaaacauggccccaa

SEQ ID NO: 35838 - RNA, 20 nt, Artificial Sequence
  Guide RNA
uccaguggccauugauggaa

SEQ ID NO: 35839 - RNA, 20 nt, Artificial Sequence
  Guide RNA
uccaucaauggccacuggaa

SEQ ID NO: 35840 - RNA, 20 nt, Artificial Sequence
  Guide RNA
ucccccuucagagauaguca

SEQ ID NO: 35841 - RNA, 20 nt, Artificial Sequence
  Guide RNA
uccccuguugacuuuucccc

SEQ ID NO: 35842 - RNA, 20 nt, Artificial Sequence
  Guide RNA
uccccuuaauuuuacuaccu

SEQ ID NO: 35843 - RNA, 20 nt, Artificial Sequence
  Guide RNA
uccguaacuuguccaaagca

SEQ ID NO: 35844 - RNA, 20 nt, Artificial Sequence
  Guide RNA
uccuaaaugcuuuggacaag

SEQ ID NO: 35845 - RNA, 20 nt, Artificial Sequence
  Guide RNA
uccuaaguuggaaaauaauc

SEQ ID NO: 35846 - RNA, 20 nt, Artificial Sequence
  Guide RNA
uccugaaaguauuugacaua

SEQ ID NO: 35847 - RNA, 20 nt, Artificial Sequence
  Guide RNA
ucggugucaguauuccguaa

SEQ ID NO: 35848 - RNA, 20 nt, Artificial Sequence
  Guide RNA
ucuaaacucuaagagauugu

SEQ ID NO: 35849 - RNA, 20 nt, Artificial Sequence
  Guide RNA
ucuaagagauugugcaugac

SEQ ID NO: 35850 - RNA, 20 nt, Artificial Sequence
  Guide RNA
ucuacaacaaauaauuccag

SEQ ID NO: 35851 - RNA, 20 nt, Artificial Sequence
  Guide RNA
ucuagaacuaaaugucuaug

SEQ ID NO: 35852 - RNA, 20 nt, Artificial Sequence
  Guide RNA
ucuauagucuggauccuaag

SEQ ID NO: 35853 - RNA, 20 nt, Artificial Sequence
  Guide RNA
ucuaugucaaauacuuucag

SEQ ID NO: 35854 - RNA, 20 nt, Artificial Sequence
  Guide RNA
ucucugaagggggaaaaguc

SEQ ID NO: 35855 - RNA, 20 nt, Artificial Sequence
  Guide RNA
ucucuuaugugcaauuagca

SEQ ID NO: 35856 - RNA, 20 nt, Artificial Sequence
  Guide RNA
ucugaagggggaaaagucaa

SEQ ID NO: 35857 - RNA, 20 nt, Artificial Sequence
  Guide RNA
ucuggauccuaaguuggaaa

SEQ ID NO: 35858 - RNA, 20 nt, Artificial Sequence
  Guide RNA
ucuuaugugcaauuagcaca

SEQ ID NO: 35859 - RNA, 20 nt, Artificial Sequence
  Guide RNA
ucuuccaguaaacauggccc

SEQ ID NO: 35860 - RNA, 20 nt, Artificial Sequence
  Guide RNA
ucuucugucuagugaauuuu

SEQ ID NO: 35861 - RNA, 20 nt, Artificial Sequence
  Guide RNA
ucuucuucugucuagugaau

SEQ ID NO: 35862 - RNA, 20 nt, Artificial Sequence
  Guide RNA
ucuucuuuugaaacugacau

SEQ ID NO: 35863 - RNA, 20 nt, Artificial Sequence
  Guide RNA
ucuuucuauagucuggaucc

SEQ ID NO: 35864 - RNA, 20 nt, Artificial Sequence
  Guide RNA
ucuuuugaaacugacauugc

SEQ ID NO: 35865 - RNA, 20 nt, Artificial Sequence
  Guide RNA
ugaaacugacauugcuuuua

SEQ ID NO: 35866 - RNA, 20 nt, Artificial Sequence
  Guide RNA
ugaacacugucaugcacaau

SEQ ID NO: 35867 - RNA, 20 nt, Artificial Sequence
  Guide RNA
ugaagggggaaaagucaaca

SEQ ID NO: 35868 - RNA, 20 nt, Artificial Sequence
  Guide RNA
ugaaggguccccuguugacu

SEQ ID NO: 35869 - RNA, 20 nt, Artificial Sequence
  Guide RNA
ugaauuccaucaauggccac

SEQ ID NO: 35870 - RNA, 20 nt, Artificial Sequence
  Guide RNA
ugacaccgauuauuuuccaa

SEQ ID NO: 35871 - RNA, 20 nt, Artificial Sequence
  Guide RNA
ugacaguguucauggugacu

SEQ ID NO: 35872 - RNA, 20 nt, Artificial Sequence
  Guide RNA
ugacauagaaagugaagggu

SEQ ID NO: 35873 - RNA, 20 nt, Artificial Sequence
  Guide RNA
ugacauugcuuuuagcagca

SEQ ID NO: 35874 - RNA, 20 nt, Artificial Sequence
  Guide RNA
ugacuaucucugaaggggga

SEQ ID NO: 35875 - RNA, 20 nt, Artificial Sequence
  Guide RNA
ugacucaacaaaguugagcc

SEQ ID NO: 35876 - RNA, 20 nt, Artificial Sequence
  Guide RNA
ugacuuggggccauguuuac

SEQ ID NO: 35877 - RNA, 20 nt, Artificial Sequence
  Guide RNA
ugacuuuucccccuucagag

SEQ ID NO: 35878 - RNA, 20 nt, Artificial Sequence
  Guide RNA
ugagacacuuuuuggcucaa

SEQ ID NO: 35879 - RNA, 20 nt, Artificial Sequence
  Guide RNA
ugagccaaaaagugucucaa

SEQ ID NO: 35880 - RNA, 20 nt, Artificial Sequence
  Guide RNA
ugauagauauuccuaaaugc

SEQ ID NO: 35881 - RNA, 20 nt, Artificial Sequence
  Guide RNA
ugauagguguucuacuuuaa

SEQ ID NO: 35882 - RNA, 20 nt, Artificial Sequence
  Guide RNA
ugauggaauucaucuuccag

SEQ ID NO: 35883 - RNA, 20 nt, Artificial Sequence
  Guide RNA
ugauuaagugacuuggggcc

SEQ ID NO: 35884 - RNA, 20 nt, Artificial Sequence
  Guide RNA
ugcacaaucucuuagaguuu

SEQ ID NO: 35885 - RNA, 20 nt, Artificial Sequence
  Guide RNA
ugcacauaagagaaauacca

SEQ ID NO: 35886 - RNA, 20 nt, Artificial Sequence
  Guide RNA
ugcaugacaguguucauggu

SEQ ID NO: 35887 - RNA, 20 nt, Artificial Sequence
  Guide RNA
ugcuaaaagcaaugucaguu

SEQ ID NO: 35888 - RNA, 20 nt, Artificial Sequence
  Guide RNA
ugcuaauugcacauaagaga

SEQ ID NO: 35889 - RNA, 20 nt, Artificial Sequence
  Guide RNA
ugcuaauuuaaaaacguccu

SEQ ID NO: 35890 - RNA, 20 nt, Artificial Sequence
  Guide RNA
ugcugcuaaaagcaauguca

SEQ ID NO: 35891 - RNA, 20 nt, Artificial Sequence
  Guide RNA
ugcuuuggacaaguuacgga

SEQ ID NO: 35892 - RNA, 20 nt, Artificial Sequence
  Guide RNA
ugcuuuuagcagcaguuuau

SEQ ID NO: 35893 - RNA, 20 nt, Artificial Sequence
  Guide RNA
uggaaaauaaucggugucag

SEQ ID NO: 35894 - RNA, 20 nt, Artificial Sequence
  Guide RNA
uggaagaugaauuccaucaa

SEQ ID NO: 35895 - RNA, 20 nt, Artificial Sequence
  Guide RNA
uggaauucaucuuccaguaa

SEQ ID NO: 35896 - RNA, 20 nt, Artificial Sequence
  Guide RNA
uggacaaguuacggaauacu

SEQ ID NO: 35897 - RNA, 20 nt, Artificial Sequence
  Guide RNA
uggauccuaaguuggaaaau

SEQ ID NO: 35898 - RNA, 20 nt, Artificial Sequence
  Guide RNA
uggcaaaacuguauaaaagu

SEQ ID NO: 35899 - RNA, 20 nt, Artificial Sequence
  Guide RNA
uggccacuggaauuauuugu

SEQ ID NO: 35900 - RNA, 20 nt, Artificial Sequence
  Guide RNA
uggccauugauggaauucau

SEQ ID NO: 35901 - RNA, 20 nt, Artificial Sequence
  Guide RNA
uggccccaagucacuuaauc

SEQ ID NO: 35902 - RNA, 20 nt, Artificial Sequence
  Guide RNA
uggcucaacuuuguugaguc

SEQ ID NO: 35903 - RNA, 20 nt, Artificial Sequence
  Guide RNA
uggggccauguuuacuggaa

SEQ ID NO: 35904 - RNA, 20 nt, Artificial Sequence
  Guide RNA
ugguauuucucuuaugugca

SEQ ID NO: 35905 - RNA, 20 nt, Artificial Sequence
  Guide RNA
uggugacuaucucugaaggg

SEQ ID NO: 35906 - RNA, 20 nt, Artificial Sequence
  Guide RNA
ugguugauuaagugacuugg

SEQ ID NO: 35907 - RNA, 20 nt, Artificial Sequence
  Guide RNA
uguaaacuucuucuucuguc

SEQ ID NO: 35908 - RNA, 20 nt, Artificial Sequence
  Guide RNA
ugucaaauacuuucaggacg

SEQ ID NO: 35909 - RNA, 20 nt, Artificial Sequence
  Guide RNA
ugucaguauuccguaacuug

SEQ ID NO: 35910 - RNA, 20 nt, Artificial Sequence
  Guide RNA
ugucaguuucaaaagaagaa

SEQ ID NO: 35911 - RNA, 20 nt, Artificial Sequence
  Guide RNA
ugucaugcacaaucucuuag

SEQ ID NO: 35912 - RNA, 20 nt, Artificial Sequence
  Guide RNA
uguccaaagcauuuaggaau

SEQ ID NO: 35913 - RNA, 20 nt, Artificial Sequence
  Guide RNA
ugucuauguaaaacagacaa

SEQ ID NO: 35914 - RNA, 20 nt, Artificial Sequence
  Guide RNA
ugucucaacaaaguuaagua

SEQ ID NO: 35915 - RNA, 20 nt, Artificial Sequence
  Guide RNA
ugucuguuuuacauagacau

SEQ ID NO: 35916 - RNA, 20 nt, Artificial Sequence
  Guide RNA
ugugcaauuagcacaaaaaa

SEQ ID NO: 35917 - RNA, 20 nt, Artificial Sequence
  Guide RNA
ugugcaugacaguguucaug

SEQ ID NO: 35918 - RNA, 20 nt, Artificial Sequence
  Guide RNA
ugugcuaauugcacauaaga

SEQ ID NO: 35919 - RNA, 20 nt, Artificial Sequence
  Guide RNA
ugugguauuucucuuaugug

SEQ ID NO: 35920 - RNA, 20 nt, Artificial Sequence
  Guide RNA
uguucauggugacuaucucu

SEQ ID NO: 35921 - RNA, 20 nt, Artificial Sequence
  Guide RNA
uguugacuuuucccccuuca

SEQ ID NO: 35922 - RNA, 20 nt, Artificial Sequence
  Guide RNA
uguugagacacuuuuuggcu

SEQ ID NO: 35923 - RNA, 20 nt, Artificial Sequence
  Guide RNA
uguugguuuccuuauugaaa

SEQ ID NO: 35924 - RNA, 20 nt, Artificial Sequence
  Guide RNA
uguuguagaaaaguuuguug

SEQ ID NO: 35925 - RNA, 20 nt, Artificial Sequence
  Guide RNA
uguuuaaccauuaauuuggc

SEQ ID NO: 35926 - RNA, 20 nt, Artificial Sequence
  Guide RNA
uguuuacuggaagaugaauu

SEQ ID NO: 35927 - RNA, 20 nt, Artificial Sequence
  Guide RNA
uuaaaaacguccugaaagua

SEQ ID NO: 35928 - RNA, 20 nt, Artificial Sequence
  Guide RNA
uuaaaguagaacaccuauca

SEQ ID NO: 35929 - RNA, 20 nt, Artificial Sequence
  Guide RNA
uuaacugauagguguucuac

SEQ ID NO: 35930 - RNA, 20 nt, Artificial Sequence
  Guide RNA
uuaacuuuguugagacacuu

SEQ ID NO: 35931 - RNA, 20 nt, Artificial Sequence
  Guide RNA
uuaagguguaaacuucuucu

SEQ ID NO: 35932 - RNA, 20 nt, Artificial Sequence
  Guide RNA
uuaagugacuuggggccaug

SEQ ID NO: 35933 - RNA, 20 nt, Artificial Sequence
  Guide RNA
uuacaccuuaaaaguacugg

SEQ ID NO: 35934 - RNA, 20 nt, Artificial Sequence
  Guide RNA
uuacggaauacugacaccga

SEQ ID NO: 35935 - RNA, 20 nt, Artificial Sequence
  Guide RNA
uuacuggaagaugaauucca

SEQ ID NO: 35936 - RNA, 20 nt, Artificial Sequence
  Guide RNA
uuacuucuuucuauagucug

SEQ ID NO: 35937 - RNA, 20 nt, Artificial Sequence
  Guide RNA
uuagcagcaguuuauguggu

SEQ ID NO: 35938 - RNA, 20 nt, Artificial Sequence
  Guide RNA
uuaggauccagacuauagaa

SEQ ID NO: 35939 - RNA, 20 nt, Artificial Sequence
  Guide RNA
uuaugugcaauuagcacaaa

SEQ ID NO: 35940 - RNA, 20 nt, Artificial Sequence
  Guide RNA
uuauuuuccaacuuaggauc

SEQ ID NO: 35941 - RNA, 20 nt, Artificial Sequence
  Guide RNA
uucaauaaggaaaccaacau

SEQ ID NO: 35942 - RNA, 20 nt, Artificial Sequence
  Guide RNA
uucacuagacagaagaagaa

SEQ ID NO: 35943 - RNA, 20 nt, Artificial Sequence
  Guide RNA
uucagagauagucaccauga

SEQ ID NO: 35944 - RNA, 20 nt, Artificial Sequence
  Guide RNA
uucaucuuccaguaaacaug

SEQ ID NO: 35945 - RNA, 20 nt, Artificial Sequence
  Guide RNA
uucauggugacuaucucuga

SEQ ID NO: 35946 - RNA, 20 nt, Artificial Sequence
  Guide RNA
uuccaacuuaggauccagac

SEQ ID NO: 35947 - RNA, 20 nt, Artificial Sequence
  Guide RNA
uuccaguaaacauggcccca

SEQ ID NO: 35948 - RNA, 20 nt, Artificial Sequence
  Guide RNA
uuccaguggccauugaugga

SEQ ID NO: 35949 - RNA, 20 nt, Artificial Sequence
  Guide RNA
uuccaucaauggccacugga

SEQ ID NO: 35950 - RNA, 20 nt, Artificial Sequence
  Guide RNA
uucccccuucagagauaguc

SEQ ID NO: 35951 - RNA, 20 nt, Artificial Sequence
  Guide RNA
uuccguaacuuguccaaagc

SEQ ID NO: 35952 - RNA, 20 nt, Artificial Sequence
  Guide RNA
uuccuaaaugcuuuggacaa

SEQ ID NO: 35953 - RNA, 20 nt, Artificial Sequence
  Guide RNA
uucuaaacucuaagagauug

SEQ ID NO: 35954 - RNA, 20 nt, Artificial Sequence
  Guide RNA
uucuauagucuggauccuaa

SEQ ID NO: 35955 - RNA, 20 nt, Artificial Sequence
  Guide RNA
uucucuuaugugcaauuagc

SEQ ID NO: 35956 - RNA, 20 nt, Artificial Sequence
  Guide RNA
uucuucugucuagugaauuu

SEQ ID NO: 35957 - RNA, 20 nt, Artificial Sequence
  Guide RNA
uucuucuucugucuagugaa

SEQ ID NO: 35958 - RNA, 20 nt, Artificial Sequence
  Guide RNA
uucuucuuuugaaacugaca

SEQ ID NO: 35959 - RNA, 20 nt, Artificial Sequence
  Guide RNA
uucuuucuauagucuggauc

SEQ ID NO: 35960 - RNA, 20 nt, Artificial Sequence
  Guide RNA
uucuuuugaaacugacauug

SEQ ID NO: 35961 - RNA, 20 nt, Artificial Sequence
  Guide RNA
uugaaacugacauugcuuuu

SEQ ID NO: 35962 - RNA, 20 nt, Artificial Sequence
  Guide RNA
uugacauagaaagugaaggg

SEQ ID NO: 35963 - RNA, 20 nt, Artificial Sequence
  Guide RNA
uugacuuuucccccuucaga

SEQ ID NO: 35964 - RNA, 20 nt, Artificial Sequence
  Guide RNA
uugagacacuuuuuggcuca

SEQ ID NO: 35965 - RNA, 20 nt, Artificial Sequence
  Guide RNA
uugagccaaaaagugucuca

SEQ ID NO: 35966 - RNA, 20 nt, Artificial Sequence
  Guide RNA
uugauggaauucaucuucca

SEQ ID NO: 35967 - RNA, 20 nt, Artificial Sequence
  Guide RNA
uugauuaagugacuuggggc

SEQ ID NO: 35968 - RNA, 20 nt, Artificial Sequence
  Guide RNA
uugcacauaagagaaauacc

SEQ ID NO: 35969 - RNA, 20 nt, Artificial Sequence
  Guide RNA
uugcuuuuagcagcaguuua

SEQ ID NO: 35970 - RNA, 20 nt, Artificial Sequence
  Guide RNA
uuggaaaauaaucgguguca

SEQ ID NO: 35971 - RNA, 20 nt, Artificial Sequence
  Guide RNA
uuggacaaguuacggaauac

SEQ ID NO: 35972 - RNA, 20 nt, Artificial Sequence
  Guide RNA
uuggcaaaacuguauaaaag

SEQ ID NO: 35973 - RNA, 20 nt, Artificial Sequence
  Guide RNA
uuggcucaacuuuguugagu

SEQ ID NO: 35974 - RNA, 20 nt, Artificial Sequence
  Guide RNA
uuggggccauguuuacugga

SEQ ID NO: 35975 - RNA, 20 nt, Artificial Sequence
  Guide RNA
uuguccaaagcauuuaggaa

SEQ ID NO: 35976 - RNA, 20 nt, Artificial Sequence
  Guide RNA
uugucuguuuuacauagaca

SEQ ID NO: 35977 - RNA, 20 nt, Artificial Sequence
  Guide RNA
uugugcaugacaguguucau

SEQ ID NO: 35978 - RNA, 20 nt, Artificial Sequence
  Guide RNA
uugugcuaauugcacauaag

SEQ ID NO: 35979 - RNA, 20 nt, Artificial Sequence
  Guide RNA
uuguugagacacuuuuuggc

SEQ ID NO: 35980 - RNA, 20 nt, Artificial Sequence
  Guide RNA
uuuaaaaacguccugaaagu

SEQ ID NO: 35981 - RNA, 20 nt, Artificial Sequence
  Guide RNA
uuuaaaguagaacaccuauc

SEQ ID NO: 35982 - RNA, 20 nt, Artificial Sequence
  Guide RNA
uuuaacugauagguguucua

SEQ ID NO: 35983 - RNA, 20 nt, Artificial Sequence
  Guide RNA
uuuaagguguaaacuucuuc

SEQ ID NO: 35984 - RNA, 20 nt, Artificial Sequence
  Guide RNA
uuuacaccuuaaaaguacug

SEQ ID NO: 35985 - RNA, 20 nt, Artificial Sequence
  Guide RNA
uuuacuggaagaugaauucc

SEQ ID NO: 35986 - RNA, 20 nt, Artificial Sequence
  Guide RNA
uuuagcagcaguuuaugugg

SEQ ID NO: 35987 - RNA, 20 nt, Artificial Sequence
  Guide RNA
uuucaauaaggaaaccaaca

SEQ ID NO: 35988 - RNA, 20 nt, Artificial Sequence
  Guide RNA
uuuccaacuuaggauccaga

SEQ ID NO: 35989 - RNA, 20 nt, Artificial Sequence
  Guide RNA
uuucccccuucagagauagu

SEQ ID NO: 35990 - RNA, 20 nt, Artificial Sequence
  Guide RNA
uuucuauagucuggauccua

SEQ ID NO: 35991 - RNA, 20 nt, Artificial Sequence
  Guide RNA
uuucucuuaugugcaauuag

SEQ ID NO: 35992 - RNA, 20 nt, Artificial Sequence
  Guide RNA
uuucuucuuuugaaacugac

SEQ ID NO: 35993 - RNA, 20 nt, Artificial Sequence
  Guide RNA
uuugaaacugacauugcuuu

SEQ ID NO: 35994 - RNA, 20 nt, Artificial Sequence
  Guide RNA
uuugacauagaaagugaagg

SEQ ID NO: 35995 - RNA, 20 nt, Artificial Sequence
  Guide RNA
uuuggacaaguuacggaaua

SEQ ID NO: 35996 - RNA, 20 nt, Artificial Sequence
  Guide RNA
uuuggcucaacuuuguugag

SEQ ID NO: 35997 - RNA, 20 nt, Artificial Sequence
  Guide RNA
uuugucuguuuuacauagac

SEQ ID NO: 35998 - RNA, 20 nt, Artificial Sequence
  Guide RNA
uuugugcuaauugcacauaa

SEQ ID NO: 35999 - RNA, 20 nt, Artificial Sequence
  Guide RNA
uuuguugagacacuuuuugg

SEQ ID NO: 36000 - RNA, 20 nt, Artificial Sequence
  Guide RNA
uuuuaacugauagguguucu

SEQ ID NO: 36001 - RNA, 20 nt, Artificial Sequence
  Guide RNA
uuuuagcagcaguuuaugug

SEQ ID NO: 36002 - RNA, 20 nt, Artificial Sequence
  Guide RNA
uuuuccaacuuaggauccag

SEQ ID NO: 36003 - RNA, 20 nt, Artificial Sequence
  Guide RNA
uuuucccccuucagagauag

SEQ ID NO: 36004 - RNA, 20 nt, Artificial Sequence
  Guide RNA
uuuugaaacugacauugcuu

SEQ ID NO: 36005 - RNA, 20 nt, Artificial Sequence
  Guide RNA
uuuuggcucaacuuuguuga

SEQ ID NO: 36006 - RNA, 20 nt, Artificial Sequence
  Guide RNA
uuuugugcuaauugcacaua

SEQ ID NO: 36007 - RNA, 20 nt, Artificial Sequence
  Guide RNA
uuuuuaacugauagguguuc

SEQ ID NO: 36008 - RNA, 20 nt, Artificial Sequence
  Guide RNA
uuuuuggcucaacuuuguug

SEQ ID NO: 36009 - RNA, 20 nt, Artificial Sequence
  Guide RNA
uuuuugugcuaauugcacau

SEQ ID NO: 36010 - RNA, 20 nt, Artificial Sequence
  Guide RNA
uuuuuugugcuaauugcaca

SEQ ID NO: 36011 - RNA, 21 nt, Artificial Sequence
  Guide RNA
aaaacguccugaaaguauuug

SEQ ID NO: 36012 - RNA, 21 nt, Artificial Sequence
  Guide RNA
aaaagucaacaggggacccuu

SEQ ID NO: 36013 - RNA, 21 nt, Artificial Sequence
  Guide RNA
aaacauggccccaagucacuu

SEQ ID NO: 36014 - RNA, 21 nt, Artificial Sequence
  Guide RNA
aaacguccugaaaguauuuga

SEQ ID NO: 36015 - RNA, 21 nt, Artificial Sequence
  Guide RNA
aaacucuaagagauugugcau

SEQ ID NO: 36016 - RNA, 21 nt, Artificial Sequence
  Guide RNA
aaacugacauugcuuuuagca

SEQ ID NO: 36017 - RNA, 21 nt, Artificial Sequence
  Guide RNA
aaacugcugcuaaaagcaaug

SEQ ID NO: 36018 - RNA, 21 nt, Artificial Sequence
  Guide RNA
aaacuucuucuucugucuagu

SEQ ID NO: 36019 - RNA, 21 nt, Artificial Sequence
  Guide RNA
aaaguacugguugauuaagug

SEQ ID NO: 36020 - RNA, 21 nt, Artificial Sequence
  Guide RNA
aaaguagaacaccuaucaguu

SEQ ID NO: 36021 - RNA, 21 nt, Artificial Sequence
  Guide RNA
aaagucaacaggggacccuuc

SEQ ID NO: 36022 - RNA, 21 nt, Artificial Sequence
  Guide RNA
aaagugaaggguccccuguug

SEQ ID NO: 36023 - RNA, 21 nt, Artificial Sequence
  Guide RNA
aaaguugagccaaaaaguguc

SEQ ID NO: 36024 - RNA, 21 nt, Artificial Sequence
  Guide RNA
aaauaaucggugucaguauuc

SEQ ID NO: 36025 - RNA, 21 nt, Artificial Sequence
  Guide RNA
aaauaauuccaguggccauug

SEQ ID NO: 36026 - RNA, 21 nt, Artificial Sequence
  Guide RNA
aaauaccacauaaacugcugc

SEQ ID NO: 36027 - RNA, 21 nt, Artificial Sequence
  Guide RNA
aaaugacucaacaaaguugag

SEQ ID NO: 36028 - RNA, 21 nt, Artificial Sequence
  Guide RNA
aaaugcuuuggacaaguuacg

SEQ ID NO: 36029 - RNA, 21 nt, Artificial Sequence
  Guide RNA
aaauucacuagacagaagaag

SEQ ID NO: 36030 - RNA, 21 nt, Artificial Sequence
  Guide RNA
aacaaaguugagccaaaaagu

SEQ ID NO: 36031 - RNA, 21 nt, Artificial Sequence
  Guide RNA
aacaaauaauuccaguggcca

SEQ ID NO: 36032 - RNA, 21 nt, Artificial Sequence
  Guide RNA
aacacugucaugcacaaucuc

SEQ ID NO: 36033 - RNA, 21 nt, Artificial Sequence
  Guide RNA
aacagacaaaacaaauguugg

SEQ ID NO: 36034 - RNA, 21 nt, Artificial Sequence
  Guide RNA
aacaggggacccuucacuuuc

SEQ ID NO: 36035 - RNA, 21 nt, Artificial Sequence
  Guide RNA
aacauggccccaagucacuua

SEQ ID NO: 36036 - RNA, 21 nt, Artificial Sequence
  Guide RNA
aaccaacauuuguuuugucug

SEQ ID NO: 36037 - RNA, 21 nt, Artificial Sequence
  Guide RNA
aaccaguacuuuuaaggugua

SEQ ID NO: 36038 - RNA, 21 nt, Artificial Sequence
  Guide RNA
aacguccugaaaguauuugac

SEQ ID NO: 36039 - RNA, 21 nt, Artificial Sequence
  Guide RNA
aacucuaagagauugugcaug

SEQ ID NO: 36040 - RNA, 21 nt, Artificial Sequence
  Guide RNA
aacugacauugcuuuuagcag

SEQ ID NO: 36041 - RNA, 21 nt, Artificial Sequence
  Guide RNA
aacugauagguguucuacuuu

SEQ ID NO: 36042 - RNA, 21 nt, Artificial Sequence
  Guide RNA
aacugcugcuaaaagcaaugu

SEQ ID NO: 36043 - RNA, 21 nt, Artificial Sequence
  Guide RNA
aacuuaggauccagacuauag

SEQ ID NO: 36044 - RNA, 21 nt, Artificial Sequence
  Guide RNA
aacuucuucuucugucuagug

SEQ ID NO: 36045 - RNA, 21 nt, Artificial Sequence
  Guide RNA
aacuuguccaaagcauuuagg

SEQ ID NO: 36046 - RNA, 21 nt, Artificial Sequence
  Guide RNA
aagagauugugcaugacagug

SEQ ID NO: 36047 - RNA, 21 nt, Artificial Sequence
  Guide RNA
aagaugaauuccaucaauggc

SEQ ID NO: 36048 - RNA, 21 nt, Artificial Sequence
  Guide RNA
aagcaaugucaguuucaaaag

SEQ ID NO: 36049 - RNA, 21 nt, Artificial Sequence
  Guide RNA
aaggaaaauucacuagacaga

SEQ ID NO: 36050 - RNA, 21 nt, Artificial Sequence
  Guide RNA
aagggggaaaagucaacaggg

SEQ ID NO: 36051 - RNA, 21 nt, Artificial Sequence
  Guide RNA
aaggguccccuguugacuuuu

SEQ ID NO: 36052 - RNA, 21 nt, Artificial Sequence
  Guide RNA
aagguaguaaaauuaagggga

SEQ ID NO: 36053 - RNA, 21 nt, Artificial Sequence
  Guide RNA
aagguguaaacuucuucuucu

SEQ ID NO: 36054 - RNA, 21 nt, Artificial Sequence
  Guide RNA
aaguacugguugauuaaguga

SEQ ID NO: 36055 - RNA, 21 nt, Artificial Sequence
  Guide RNA
aaguagaacaccuaucaguua

SEQ ID NO: 36056 - RNA, 21 nt, Artificial Sequence
  Guide RNA
aagucaacaggggacccuuca

SEQ ID NO: 36057 - RNA, 21 nt, Artificial Sequence
  Guide RNA
aagucacuuaaucaaccagua

SEQ ID NO: 36058 - RNA, 21 nt, Artificial Sequence
  Guide RNA
aagugaaggguccccuguuga

SEQ ID NO: 36059 - RNA, 21 nt, Artificial Sequence
  Guide RNA
aagugacuuggggccauguuu

SEQ ID NO: 36060 - RNA, 21 nt, Artificial Sequence
  Guide RNA
aagugucucaacaaaguuaag

SEQ ID NO: 36061 - RNA, 21 nt, Artificial Sequence
  Guide RNA
aaguuacggaauacugacacc

SEQ ID NO: 36062 - RNA, 21 nt, Artificial Sequence
  Guide RNA
aaguugagccaaaaagugucu

SEQ ID NO: 36063 - RNA, 21 nt, Artificial Sequence
  Guide RNA
aaguuggaaaauaaucggugu

SEQ ID NO: 36064 - RNA, 21 nt, Artificial Sequence
  Guide RNA
aauaaucggugucaguauucc

SEQ ID NO: 36065 - RNA, 21 nt, Artificial Sequence
  Guide RNA
aauaauuccaguggccauuga

SEQ ID NO: 36066 - RNA, 21 nt, Artificial Sequence
  Guide RNA
aauaccacauaaacugcugcu

SEQ ID NO: 36067 - RNA, 21 nt, Artificial Sequence
  Guide RNA
aaucaaccaguacuuuuaagg

SEQ ID NO: 36068 - RNA, 21 nt, Artificial Sequence
  Guide RNA
aauccccuuaauuuuacuacc

SEQ ID NO: 36069 - RNA, 21 nt, Artificial Sequence
  Guide RNA
aaucggugucaguauuccgua

SEQ ID NO: 36070 - RNA, 21 nt, Artificial Sequence
  Guide RNA
aaugacucaacaaaguugagc

SEQ ID NO: 36071 - RNA, 21 nt, Artificial Sequence
  Guide RNA
aaugcuuuggacaaguuacgg

SEQ ID NO: 36072 - RNA, 21 nt, Artificial Sequence
  Guide RNA
aauggccacuggaauuauuug

SEQ ID NO: 36073 - RNA, 21 nt, Artificial Sequence
  Guide RNA
aauucacuagacagaagaaga

SEQ ID NO: 36074 - RNA, 21 nt, Artificial Sequence
  Guide RNA
aauuccaguggccauugaugg

SEQ ID NO: 36075 - RNA, 21 nt, Artificial Sequence
  Guide RNA
aauuccaucaauggccacugg

SEQ ID NO: 36076 - RNA, 21 nt, Artificial Sequence
  Guide RNA
acaaaacaaauguugguuucc

SEQ ID NO: 36077 - RNA, 21 nt, Artificial Sequence
  Guide RNA
acaaaguugagccaaaaagug

SEQ ID NO: 36078 - RNA, 21 nt, Artificial Sequence
  Guide RNA
acaaauaauuccaguggccau

SEQ ID NO: 36079 - RNA, 21 nt, Artificial Sequence
  Guide RNA
acaacaaauaauuccaguggc

SEQ ID NO: 36080 - RNA, 21 nt, Artificial Sequence
  Guide RNA
acaaguuacggaauacugaca

SEQ ID NO: 36081 - RNA, 21 nt, Artificial Sequence
  Guide RNA
acaccgauuauuuuccaacuu

SEQ ID NO: 36082 - RNA, 21 nt, Artificial Sequence
  Guide RNA
acaccuuaaaaguacugguug

SEQ ID NO: 36083 - RNA, 21 nt, Artificial Sequence
  Guide RNA
acacugucaugcacaaucucu

SEQ ID NO: 36084 - RNA, 21 nt, Artificial Sequence
  Guide RNA
acacuuuuuggcucaacuuug

SEQ ID NO: 36085 - RNA, 21 nt, Artificial Sequence
  Guide RNA
acagaagaagaaguuuacacc

SEQ ID NO: 36086 - RNA, 21 nt, Artificial Sequence
  Guide RNA
acagacaaaacaaauguuggu

SEQ ID NO: 36087 - RNA, 21 nt, Artificial Sequence
  Guide RNA
acaggggacccuucacuuucu

SEQ ID NO: 36088 - RNA, 21 nt, Artificial Sequence
  Guide RNA
acaguguucauggugacuauc

SEQ ID NO: 36089 - RNA, 21 nt, Artificial Sequence
  Guide RNA
acauaaacugcugcuaaaagc

SEQ ID NO: 36090 - RNA, 21 nt, Artificial Sequence
  Guide RNA
acauagaaagugaaggguccc

SEQ ID NO: 36091 - RNA, 21 nt, Artificial Sequence
  Guide RNA
acauggccccaagucacuuaa

SEQ ID NO: 36092 - RNA, 21 nt, Artificial Sequence
  Guide RNA
acauugcuuuuagcagcaguu

SEQ ID NO: 36093 - RNA, 21 nt, Artificial Sequence
  Guide RNA
accaacauuuguuuugucugu

SEQ ID NO: 36094 - RNA, 21 nt, Artificial Sequence
  Guide RNA
accacauaaacugcugcuaaa

SEQ ID NO: 36095 - RNA, 21 nt, Artificial Sequence
  Guide RNA
accaguacuuuuaagguguaa

SEQ ID NO: 36096 - RNA, 21 nt, Artificial Sequence
  Guide RNA
accaugaacacugucaugcac

SEQ ID NO: 36097 - RNA, 21 nt, Artificial Sequence
  Guide RNA
acccuucacuuucuaugucaa

SEQ ID NO: 36098 - RNA, 21 nt, Artificial Sequence
  Guide RNA
accgauuauuuuccaacuuag

SEQ ID NO: 36099 - RNA, 21 nt, Artificial Sequence
  Guide RNA
accuuaaaaguacugguugau

SEQ ID NO: 36100 - RNA, 21 nt, Artificial Sequence
  Guide RNA
acggaauacugacaccgauua

SEQ ID NO: 36101 - RNA, 21 nt, Artificial Sequence
  Guide RNA
acguccugaaaguauuugaca

SEQ ID NO: 36102 - RNA, 21 nt, Artificial Sequence
  Guide RNA
acuagacagaagaagaaguuu

SEQ ID NO: 36103 - RNA, 21 nt, Artificial Sequence
  Guide RNA
acuaucucugaagggggaaaa

SEQ ID NO: 36104 - RNA, 21 nt, Artificial Sequence
  Guide RNA
acucaacaaaguugagccaaa

SEQ ID NO: 36105 - RNA, 21 nt, Artificial Sequence
  Guide RNA
acucuaagagauugugcauga

SEQ ID NO: 36106 - RNA, 21 nt, Artificial Sequence
  Guide RNA
acugacaccgauuauuuucca

SEQ ID NO: 36107 - RNA, 21 nt, Artificial Sequence
  Guide RNA
acugacauugcuuuuagcagc

SEQ ID NO: 36108 - RNA, 21 nt, Artificial Sequence
  Guide RNA
acugauagguguucuacuuua

SEQ ID NO: 36109 - RNA, 21 nt, Artificial Sequence
  Guide RNA
acugcugcuaaaagcaauguc

SEQ ID NO: 36110 - RNA, 21 nt, Artificial Sequence
  Guide RNA
acuggaagaugaauuccauca

SEQ ID NO: 36111 - RNA, 21 nt, Artificial Sequence
  Guide RNA
acugguugauuaagugacuug

SEQ ID NO: 36112 - RNA, 21 nt, Artificial Sequence
  Guide RNA
acugucaugcacaaucucuua

SEQ ID NO: 36113 - RNA, 21 nt, Artificial Sequence
  Guide RNA
acuuaacuuuguugagacacu

SEQ ID NO: 36114 - RNA, 21 nt, Artificial Sequence
  Guide RNA
acuuaggauccagacuauaga

SEQ ID NO: 36115 - RNA, 21 nt, Artificial Sequence
  Guide RNA
acuucuucuucugucuaguga

SEQ ID NO: 36116 - RNA, 21 nt, Artificial Sequence
  Guide RNA
acuucuuucuauagucuggau

SEQ ID NO: 36117 - RNA, 21 nt, Artificial Sequence
  Guide RNA
acuuggggccauguuuacugg

SEQ ID NO: 36118 - RNA, 21 nt, Artificial Sequence
  Guide RNA
acuuguccaaagcauuuagga

SEQ ID NO: 36119 - RNA, 21 nt, Artificial Sequence
  Guide RNA
acuuuguugagacacuuuuug

SEQ ID NO: 36120 - RNA, 21 nt, Artificial Sequence
  Guide RNA
acuuuucccccuucagagaua

SEQ ID NO: 36121 - RNA, 21 nt, Artificial Sequence
  Guide RNA
acuuuuuggcucaacuuuguu

SEQ ID NO: 36122 - RNA, 21 nt, Artificial Sequence
  Guide RNA
agaaagugaaggguccccugu

SEQ ID NO: 36123 - RNA, 21 nt, Artificial Sequence
  Guide RNA
agaaauaccacauaaacugcu

SEQ ID NO: 36124 - RNA, 21 nt, Artificial Sequence
  Guide RNA
agaagaagaaguuuacaccuu

SEQ ID NO: 36125 - RNA, 21 nt, Artificial Sequence
  Guide RNA
agaagguaguaaaauuaaggg

SEQ ID NO: 36126 - RNA, 21 nt, Artificial Sequence
  Guide RNA
agacacuuuuuggcucaacuu

SEQ ID NO: 36127 - RNA, 21 nt, Artificial Sequence
  Guide RNA
agacagaagaagaaguuuaca

SEQ ID NO: 36128 - RNA, 21 nt, Artificial Sequence
  Guide RNA
agagaaauaccacauaaacug

SEQ ID NO: 36129 - RNA, 21 nt, Artificial Sequence
  Guide RNA
agagauagucaccaugaacac

SEQ ID NO: 36130 - RNA, 21 nt, Artificial Sequence
  Guide RNA
agagauugugcaugacagugu

SEQ ID NO: 36131 - RNA, 21 nt, Artificial Sequence
  Guide RNA
agauagucaccaugaacacug

SEQ ID NO: 36132 - RNA, 21 nt, Artificial Sequence
  Guide RNA
agauauuccuaaaugcuuugg

SEQ ID NO: 36133 - RNA, 21 nt, Artificial Sequence
  Guide RNA
agaugaauuccaucaauggcc

SEQ ID NO: 36134 - RNA, 21 nt, Artificial Sequence
  Guide RNA
agauugugcaugacaguguuc

SEQ ID NO: 36135 - RNA, 21 nt, Artificial Sequence
  Guide RNA
agcaaugucaguuucaaaaga

SEQ ID NO: 36136 - RNA, 21 nt, Artificial Sequence
  Guide RNA
agcacuuuuauacaguuuugc

SEQ ID NO: 36137 - RNA, 21 nt, Artificial Sequence
  Guide RNA
agcagcaguuuaugugguauu

SEQ ID NO: 36138 - RNA, 21 nt, Artificial Sequence
  Guide RNA
agcaguuuaugugguauuucu

SEQ ID NO: 36139 - RNA, 21 nt, Artificial Sequence
  Guide RNA
agccaaaaagugucucaacaa

SEQ ID NO: 36140 - RNA, 21 nt, Artificial Sequence
  Guide RNA
aggaaaauucacuagacagaa

SEQ ID NO: 36141 - RNA, 21 nt, Artificial Sequence
  Guide RNA
aggaaaccaacauuuguuuug

SEQ ID NO: 36142 - RNA, 21 nt, Artificial Sequence
  Guide RNA
aggauccagacuauagaaaga

SEQ ID NO: 36143 - RNA, 21 nt, Artificial Sequence
  Guide RNA
aggggacccuucacuuucuau

SEQ ID NO: 36144 - RNA, 21 nt, Artificial Sequence
  Guide RNA
agggggaaaagucaacagggg

SEQ ID NO: 36145 - RNA, 21 nt, Artificial Sequence
  Guide RNA
aggguccccuguugacuuuuc

SEQ ID NO: 36146 - RNA, 21 nt, Artificial Sequence
  Guide RNA
agguaguaaaauuaaggggau

SEQ ID NO: 36147 - RNA, 21 nt, Artificial Sequence
  Guide RNA
agguguaaacuucuucuucug

SEQ ID NO: 36148 - RNA, 21 nt, Artificial Sequence
  Guide RNA
aguaaacauggccccaaguca

SEQ ID NO: 36149 - RNA, 21 nt, Artificial Sequence
  Guide RNA
aguacugguugauuaagugac

SEQ ID NO: 36150 - RNA, 21 nt, Artificial Sequence
  Guide RNA
aguagaacaccuaucaguuaa

SEQ ID NO: 36151 - RNA, 21 nt, Artificial Sequence
  Guide RNA
aguauuccguaacuuguccaa

SEQ ID NO: 36152 - RNA, 21 nt, Artificial Sequence
  Guide RNA
agucaacaggggacccuucac

SEQ ID NO: 36153 - RNA, 21 nt, Artificial Sequence
  Guide RNA
agucaccaugaacacugucau

SEQ ID NO: 36154 - RNA, 21 nt, Artificial Sequence
  Guide RNA
agucacuuaaucaaccaguac

SEQ ID NO: 36155 - RNA, 21 nt, Artificial Sequence
  Guide RNA
agucuggauccuaaguuggaa

SEQ ID NO: 36156 - RNA, 21 nt, Artificial Sequence
  Guide RNA
agugaaggguccccuguugac

SEQ ID NO: 36157 - RNA, 21 nt, Artificial Sequence
  Guide RNA
agugacuuggggccauguuua

SEQ ID NO: 36158 - RNA, 21 nt, Artificial Sequence
  Guide RNA
aguggccauugauggaauuca

SEQ ID NO: 36159 - RNA, 21 nt, Artificial Sequence
  Guide RNA
agugucucaacaaaguuaagu

SEQ ID NO: 36160 - RNA, 21 nt, Artificial Sequence
  Guide RNA
aguguucauggugacuaucuc

SEQ ID NO: 36161 - RNA, 21 nt, Artificial Sequence
  Guide RNA
aguuacggaauacugacaccg

SEQ ID NO: 36162 - RNA, 21 nt, Artificial Sequence
  Guide RNA
aguugagccaaaaagugucuc

SEQ ID NO: 36163 - RNA, 21 nt, Artificial Sequence
  Guide RNA
aguuggaaaauaaucgguguc

SEQ ID NO: 36164 - RNA, 21 nt, Artificial Sequence
  Guide RNA
auaaacugcugcuaaaagcaa

SEQ ID NO: 36165 - RNA, 21 nt, Artificial Sequence
  Guide RNA
auaaucggugucaguauuccg

SEQ ID NO: 36166 - RNA, 21 nt, Artificial Sequence
  Guide RNA
auaauuccaguggccauugau

SEQ ID NO: 36167 - RNA, 21 nt, Artificial Sequence
  Guide RNA
auaccacauaaacugcugcua

SEQ ID NO: 36168 - RNA, 21 nt, Artificial Sequence
  Guide RNA
auacugacaccgauuauuuuc

SEQ ID NO: 36169 - RNA, 21 nt, Artificial Sequence
  Guide RNA
auagaaagugaaggguccccu

SEQ ID NO: 36170 - RNA, 21 nt, Artificial Sequence
  Guide RNA
auagucaccaugaacacuguc

SEQ ID NO: 36171 - RNA, 21 nt, Artificial Sequence
  Guide RNA
auagucuggauccuaaguugg

SEQ ID NO: 36172 - RNA, 21 nt, Artificial Sequence
  Guide RNA
auauuccuaaaugcuuuggac

SEQ ID NO: 36173 - RNA, 21 nt, Artificial Sequence
  Guide RNA
aucaaccaguacuuuuaaggu

SEQ ID NO: 36174 - RNA, 21 nt, Artificial Sequence
  Guide RNA
aucaauggccacuggaauuau

SEQ ID NO: 36175 - RNA, 21 nt, Artificial Sequence
  Guide RNA
auccagacuauagaaagaagu

SEQ ID NO: 36176 - RNA, 21 nt, Artificial Sequence
  Guide RNA
auccccuuaauuuuacuaccu

SEQ ID NO: 36177 - RNA, 21 nt, Artificial Sequence
  Guide RNA
aucggugucaguauuccguaa

SEQ ID NO: 36178 - RNA, 21 nt, Artificial Sequence
  Guide RNA
aucucugaagggggaaaaguc

SEQ ID NO: 36179 - RNA, 21 nt, Artificial Sequence
  Guide RNA
aucuuccaguaaacauggccc

SEQ ID NO: 36180 - RNA, 21 nt, Artificial Sequence
  Guide RNA
augaacacugucaugcacaau

SEQ ID NO: 36181 - RNA, 21 nt, Artificial Sequence
  Guide RNA
augaauuccaucaauggccac

SEQ ID NO: 36182 - RNA, 21 nt, Artificial Sequence
  Guide RNA
augacaguguucauggugacu

SEQ ID NO: 36183 - RNA, 21 nt, Artificial Sequence
  Guide RNA
augacucaacaaaguugagcc

SEQ ID NO: 36184 - RNA, 21 nt, Artificial Sequence
  Guide RNA
augcacaaucucuuagaguuu

SEQ ID NO: 36185 - RNA, 21 nt, Artificial Sequence
  Guide RNA
augcuuuggacaaguuacgga

SEQ ID NO: 36186 - RNA, 21 nt, Artificial Sequence
  Guide RNA
auggaauucaucuuccaguaa

SEQ ID NO: 36187 - RNA, 21 nt, Artificial Sequence
  Guide RNA
auggccacuggaauuauuugu

SEQ ID NO: 36188 - RNA, 21 nt, Artificial Sequence
  Guide RNA
auggccccaagucacuuaauc

SEQ ID NO: 36189 - RNA, 21 nt, Artificial Sequence
  Guide RNA
auggugacuaucucugaaggg

SEQ ID NO: 36190 - RNA, 21 nt, Artificial Sequence
  Guide RNA
augucaaauacuuucaggacg

SEQ ID NO: 36191 - RNA, 21 nt, Artificial Sequence
  Guide RNA
augugguauuucucuuaugug

SEQ ID NO: 36192 - RNA, 21 nt, Artificial Sequence
  Guide RNA
auuaagugacuuggggccaug

SEQ ID NO: 36193 - RNA, 21 nt, Artificial Sequence
  Guide RNA
auucacuagacagaagaagaa

SEQ ID NO: 36194 - RNA, 21 nt, Artificial Sequence
  Guide RNA
auucaucuuccaguaaacaug

SEQ ID NO: 36195 - RNA, 21 nt, Artificial Sequence
  Guide RNA
auuccaguggccauugaugga

SEQ ID NO: 36196 - RNA, 21 nt, Artificial Sequence
  Guide RNA
auuccaucaauggccacugga

SEQ ID NO: 36197 - RNA, 21 nt, Artificial Sequence
  Guide RNA
auuccguaacuuguccaaagc

SEQ ID NO: 36198 - RNA, 21 nt, Artificial Sequence
  Guide RNA
auuccuaaaugcuuuggacaa

SEQ ID NO: 36199 - RNA, 21 nt, Artificial Sequence
  Guide RNA
auugauggaauucaucuucca

SEQ ID NO: 36200 - RNA, 21 nt, Artificial Sequence
  Guide RNA
auugcacauaagagaaauacc

SEQ ID NO: 36201 - RNA, 21 nt, Artificial Sequence
  Guide RNA
auugcuuuuagcagcaguuua

SEQ ID NO: 36202 - RNA, 21 nt, Artificial Sequence
  Guide RNA
auugugcaugacaguguucau

SEQ ID NO: 36203 - RNA, 21 nt, Artificial Sequence
  Guide RNA
auuugacauagaaagugaagg

SEQ ID NO: 36204 - RNA, 21 nt, Artificial Sequence
  Guide RNA
auuuuccaacuuaggauccag

SEQ ID NO: 36205 - RNA, 21 nt, Artificial Sequence
  Guide RNA
caaaaagugucucaacaaagu

SEQ ID NO: 36206 - RNA, 21 nt, Artificial Sequence
  Guide RNA
caaaacaaauguugguuuccu

SEQ ID NO: 36207 - RNA, 21 nt, Artificial Sequence
  Guide RNA
caaaguugagccaaaaagugu

SEQ ID NO: 36208 - RNA, 21 nt, Artificial Sequence
  Guide RNA
caaauaauuccaguggccauu

SEQ ID NO: 36209 - RNA, 21 nt, Artificial Sequence
  Guide RNA
caaauacuuucaggacguuuu

SEQ ID NO: 36210 - RNA, 21 nt, Artificial Sequence
  Guide RNA
caaauguugguuuccuuauug

SEQ ID NO: 36211 - RNA, 21 nt, Artificial Sequence
  Guide RNA
caacaaaguugagccaaaaag

SEQ ID NO: 36212 - RNA, 21 nt, Artificial Sequence
  Guide RNA
caacaaauaauuccaguggcc

SEQ ID NO: 36213 - RNA, 21 nt, Artificial Sequence
  Guide RNA
caacaggggacccuucacuuu

SEQ ID NO: 36214 - RNA, 21 nt, Artificial Sequence
  Guide RNA
caaccaguacuuuuaaggugu

SEQ ID NO: 36215 - RNA, 21 nt, Artificial Sequence
  Guide RNA
caacuuaggauccagacuaua

SEQ ID NO: 36216 - RNA, 21 nt, Artificial Sequence
  Guide RNA
caagucacuuaaucaaccagu

SEQ ID NO: 36217 - RNA, 21 nt, Artificial Sequence
  Guide RNA
caaguuacggaauacugacac

SEQ ID NO: 36218 - RNA, 21 nt, Artificial Sequence
  Guide RNA
caauaaggaaaccaacauuug

SEQ ID NO: 36219 - RNA, 21 nt, Artificial Sequence
  Guide RNA
caauggccacuggaauuauuu

SEQ ID NO: 36220 - RNA, 21 nt, Artificial Sequence
  Guide RNA
caaugucaguuucaaaagaag

SEQ ID NO: 36221 - RNA, 21 nt, Artificial Sequence
  Guide RNA
cacaaucucuuagaguuuaga

SEQ ID NO: 36222 - RNA, 21 nt, Artificial Sequence
  Guide RNA
cacauaaacugcugcuaaaag

SEQ ID NO: 36223 - RNA, 21 nt, Artificial Sequence
  Guide RNA
cacauaagagaaauaccacau

SEQ ID NO: 36224 - RNA, 21 nt, Artificial Sequence
  Guide RNA
caccaugaacacugucaugca

SEQ ID NO: 36225 - RNA, 21 nt, Artificial Sequence
  Guide RNA
caccgauuauuuuccaacuua

SEQ ID NO: 36226 - RNA, 21 nt, Artificial Sequence
  Guide RNA
caccuuaaaaguacugguuga

SEQ ID NO: 36227 - RNA, 21 nt, Artificial Sequence
  Guide RNA
cacuagacagaagaagaaguu

SEQ ID NO: 36228 - RNA, 21 nt, Artificial Sequence
  Guide RNA
cacuggaauuauuuguuguag

SEQ ID NO: 36229 - RNA, 21 nt, Artificial Sequence
  Guide RNA
cacugucaugcacaaucucuu

SEQ ID NO: 36230 - RNA, 21 nt, Artificial Sequence
  Guide RNA
cacuuaaucaaccaguacuuu

SEQ ID NO: 36231 - RNA, 21 nt, Artificial Sequence
  Guide RNA
cacuuuuauacaguuuugcca

SEQ ID NO: 36232 - RNA, 21 nt, Artificial Sequence
  Guide RNA
cacuuuuuggcucaacuuugu

SEQ ID NO: 36233 - RNA, 21 nt, Artificial Sequence
  Guide RNA
cagaagaagaaguuuacaccu

SEQ ID NO: 36234 - RNA, 21 nt, Artificial Sequence
  Guide RNA
cagacaaaacaaauguugguu

SEQ ID NO: 36235 - RNA, 21 nt, Artificial Sequence
  Guide RNA
cagagauagucaccaugaaca

SEQ ID NO: 36236 - RNA, 21 nt, Artificial Sequence
  Guide RNA
cagcaguuuaugugguauuuc

SEQ ID NO: 36237 - RNA, 21 nt, Artificial Sequence
  Guide RNA
caggggacccuucacuuucua

SEQ ID NO: 36238 - RNA, 21 nt, Artificial Sequence
  Guide RNA
caguaaacauggccccaaguc

SEQ ID NO: 36239 - RNA, 21 nt, Artificial Sequence
  Guide RNA
caguacuuuuaagguguaaac

SEQ ID NO: 36240 - RNA, 21 nt, Artificial Sequence
  Guide RNA
caguauuccguaacuugucca

SEQ ID NO: 36241 - RNA, 21 nt, Artificial Sequence
  Guide RNA
caguggccauugauggaauuc

SEQ ID NO: 36242 - RNA, 21 nt, Artificial Sequence
  Guide RNA
caguguucauggugacuaucu

SEQ ID NO: 36243 - RNA, 21 nt, Artificial Sequence
  Guide RNA
caguuuaugugguauuucucu

SEQ ID NO: 36244 - RNA, 21 nt, Artificial Sequence
  Guide RNA
cauaaacugcugcuaaaagca

SEQ ID NO: 36245 - RNA, 21 nt, Artificial Sequence
  Guide RNA
cauagaaagugaagggucccc

SEQ ID NO: 36246 - RNA, 21 nt, Artificial Sequence
  Guide RNA
caucaauggccacuggaauua

SEQ ID NO: 36247 - RNA, 21 nt, Artificial Sequence
  Guide RNA
caucuuccaguaaacauggcc

SEQ ID NO: 36248 - RNA, 21 nt, Artificial Sequence
  Guide RNA
caugaacacugucaugcacaa

SEQ ID NO: 36249 - RNA, 21 nt, Artificial Sequence
  Guide RNA
caugacaguguucauggugac

SEQ ID NO: 36250 - RNA, 21 nt, Artificial Sequence
  Guide RNA
caugcacaaucucuuagaguu

SEQ ID NO: 36251 - RNA, 21 nt, Artificial Sequence
  Guide RNA
cauggccccaagucacuuaau

SEQ ID NO: 36252 - RNA, 21 nt, Artificial Sequence
  Guide RNA
cauggugacuaucucugaagg

SEQ ID NO: 36253 - RNA, 21 nt, Artificial Sequence
  Guide RNA
cauguuuacuggaagaugaau

SEQ ID NO: 36254 - RNA, 21 nt, Artificial Sequence
  Guide RNA
cauugauggaauucaucuucc

SEQ ID NO: 36255 - RNA, 21 nt, Artificial Sequence
  Guide RNA
cauugcuuuuagcagcaguuu

SEQ ID NO: 36256 - RNA, 21 nt, Artificial Sequence
  Guide RNA
ccaaaaagugucucaacaaag

SEQ ID NO: 36257 - RNA, 21 nt, Artificial Sequence
  Guide RNA
ccaaagcauuuaggaauaucu

SEQ ID NO: 36258 - RNA, 21 nt, Artificial Sequence
  Guide RNA
ccaacauuuguuuugucuguu

SEQ ID NO: 36259 - RNA, 21 nt, Artificial Sequence
  Guide RNA
ccaacuuaggauccagacuau

SEQ ID NO: 36260 - RNA, 21 nt, Artificial Sequence
  Guide RNA
ccaagucacuuaaucaaccag

SEQ ID NO: 36261 - RNA, 21 nt, Artificial Sequence
  Guide RNA
ccacauaaacugcugcuaaaa

SEQ ID NO: 36262 - RNA, 21 nt, Artificial Sequence
  Guide RNA
ccacuggaauuauuuguugua

SEQ ID NO: 36263 - RNA, 21 nt, Artificial Sequence
  Guide RNA
ccagacuauagaaagaaguaa

SEQ ID NO: 36264 - RNA, 21 nt, Artificial Sequence
  Guide RNA
ccaguaaacauggccccaagu

SEQ ID NO: 36265 - RNA, 21 nt, Artificial Sequence
  Guide RNA
ccaguacuuuuaagguguaaa

SEQ ID NO: 36266 - RNA, 21 nt, Artificial Sequence
  Guide RNA
ccaguggccauugauggaauu

SEQ ID NO: 36267 - RNA, 21 nt, Artificial Sequence
  Guide RNA
ccaucaauggccacuggaauu

SEQ ID NO: 36268 - RNA, 21 nt, Artificial Sequence
  Guide RNA
ccaugaacacugucaugcaca

SEQ ID NO: 36269 - RNA, 21 nt, Artificial Sequence
  Guide RNA
ccauguuuacuggaagaugaa

SEQ ID NO: 36270 - RNA, 21 nt, Artificial Sequence
  Guide RNA
ccauugauggaauucaucuuc

SEQ ID NO: 36271 - RNA, 21 nt, Artificial Sequence
  Guide RNA
cccaagucacuuaaucaacca

SEQ ID NO: 36272 - RNA, 21 nt, Artificial Sequence
  Guide RNA
ccccaagucacuuaaucaacc

SEQ ID NO: 36273 - RNA, 21 nt, Artificial Sequence
  Guide RNA
cccccuucagagauagucacc

SEQ ID NO: 36274 - RNA, 21 nt, Artificial Sequence
  Guide RNA
ccccuguugacuuuucccccu

SEQ ID NO: 36275 - RNA, 21 nt, Artificial Sequence
  Guide RNA
ccccuuaauuuuacuaccuuc

SEQ ID NO: 36276 - RNA, 21 nt, Artificial Sequence
  Guide RNA
ccccuucagagauagucacca

SEQ ID NO: 36277 - RNA, 21 nt, Artificial Sequence
  Guide RNA
cccuguugacuuuucccccuu

SEQ ID NO: 36278 - RNA, 21 nt, Artificial Sequence
  Guide RNA
cccuuaauuuuacuaccuucu

SEQ ID NO: 36279 - RNA, 21 nt, Artificial Sequence
  Guide RNA
cccuucacuuucuaugucaaa

SEQ ID NO: 36280 - RNA, 21 nt, Artificial Sequence
  Guide RNA
cccuucagagauagucaccau

SEQ ID NO: 36281 - RNA, 21 nt, Artificial Sequence
  Guide RNA
ccgauuauuuuccaacuuagg

SEQ ID NO: 36282 - RNA, 21 nt, Artificial Sequence
  Guide RNA
ccguaacuuguccaaagcauu

SEQ ID NO: 36283 - RNA, 21 nt, Artificial Sequence
  Guide RNA
ccuaaaugcuuuggacaaguu

SEQ ID NO: 36284 - RNA, 21 nt, Artificial Sequence
  Guide RNA
ccuaaguuggaaaauaaucgg

SEQ ID NO: 36285 - RNA, 21 nt, Artificial Sequence
  Guide RNA
ccuaggagauuuaacauuuac

SEQ ID NO: 36286 - RNA, 21 nt, Artificial Sequence
  Guide RNA
ccugaaaguauuugacauaga

SEQ ID NO: 36287 - RNA, 21 nt, Artificial Sequence
  Guide RNA
ccuguugacuuuucccccuuc

SEQ ID NO: 36288 - RNA, 21 nt, Artificial Sequence
  Guide RNA
ccuuaaaaguacugguugauu

SEQ ID NO: 36289 - RNA, 21 nt, Artificial Sequence
  Guide RNA
ccuucacuuucuaugucaaau

SEQ ID NO: 36290 - RNA, 21 nt, Artificial Sequence
  Guide RNA
ccuucagagauagucaccaug

SEQ ID NO: 36291 - RNA, 21 nt, Artificial Sequence
  Guide RNA
cgauuauuuuccaacuuagga

SEQ ID NO: 36292 - RNA, 21 nt, Artificial Sequence
  Guide RNA
cggaauacugacaccgauuau

SEQ ID NO: 36293 - RNA, 21 nt, Artificial Sequence
  Guide RNA
cggugucaguauuccguaacu

SEQ ID NO: 36294 - RNA, 21 nt, Artificial Sequence
  Guide RNA
cguaacuuguccaaagcauuu

SEQ ID NO: 36295 - RNA, 21 nt, Artificial Sequence
  Guide RNA
cguccugaaaguauuugacau

SEQ ID NO: 36296 - RNA, 21 nt, Artificial Sequence
  Guide RNA
cuaaaagcaaugucaguuuca

SEQ ID NO: 36297 - RNA, 21 nt, Artificial Sequence
  Guide RNA
cuaaacucuaagagauugugc

SEQ ID NO: 36298 - RNA, 21 nt, Artificial Sequence
  Guide RNA
cuaaaugcuuuggacaaguua

SEQ ID NO: 36299 - RNA, 21 nt, Artificial Sequence
  Guide RNA
cuaagagauugugcaugacag

SEQ ID NO: 36300 - RNA, 21 nt, Artificial Sequence
  Guide RNA
cuaaguuggaaaauaaucggu

SEQ ID NO: 36301 - RNA, 21 nt, Artificial Sequence
  Guide RNA
cuacaacaaauaauuccagug

SEQ ID NO: 36302 - RNA, 21 nt, Artificial Sequence
  Guide RNA
cuagacagaagaagaaguuua

SEQ ID NO: 36303 - RNA, 21 nt, Artificial Sequence
  Guide RNA
cuauagucuggauccuaaguu

SEQ ID NO: 36304 - RNA, 21 nt, Artificial Sequence
  Guide RNA
cuaucucugaagggggaaaag

SEQ ID NO: 36305 - RNA, 21 nt, Artificial Sequence
  Guide RNA
cuaugucaaauacuuucagga

SEQ ID NO: 36306 - RNA, 21 nt, Artificial Sequence
  Guide RNA
cucaacaaaguugagccaaaa

SEQ ID NO: 36307 - RNA, 21 nt, Artificial Sequence
  Guide RNA
cucaacuuuguugagucauuu

SEQ ID NO: 36308 - RNA, 21 nt, Artificial Sequence
  Guide RNA
cucuaagagauugugcaugac

SEQ ID NO: 36309 - RNA, 21 nt, Artificial Sequence
  Guide RNA
cucugaagggggaaaagucaa

SEQ ID NO: 36310 - RNA, 21 nt, Artificial Sequence
  Guide RNA
cucuuaugugcaauuagcaca

SEQ ID NO: 36311 - RNA, 21 nt, Artificial Sequence
  Guide RNA
cugaagggggaaaagucaaca

SEQ ID NO: 36312 - RNA, 21 nt, Artificial Sequence
  Guide RNA
cugacaccgauuauuuuccaa

SEQ ID NO: 36313 - RNA, 21 nt, Artificial Sequence
  Guide RNA
cugacauugcuuuuagcagca

SEQ ID NO: 36314 - RNA, 21 nt, Artificial Sequence
  Guide RNA
cugauagguguucuacuuuaa

SEQ ID NO: 36315 - RNA, 21 nt, Artificial Sequence
  Guide RNA
cugcuaaaagcaaugucaguu

SEQ ID NO: 36316 - RNA, 21 nt, Artificial Sequence
  Guide RNA
cugcugcuaaaagcaauguca

SEQ ID NO: 36317 - RNA, 21 nt, Artificial Sequence
  Guide RNA
cuggaagaugaauuccaucaa

SEQ ID NO: 36318 - RNA, 21 nt, Artificial Sequence
  Guide RNA
cuggauccuaaguuggaaaau

SEQ ID NO: 36319 - RNA, 21 nt, Artificial Sequence
  Guide RNA
cugguugauuaagugacuugg

SEQ ID NO: 36320 - RNA, 21 nt, Artificial Sequence
  Guide RNA
cugucaugcacaaucucuuag

SEQ ID NO: 36321 - RNA, 21 nt, Artificial Sequence
  Guide RNA
cuguugacuuuucccccuuca

SEQ ID NO: 36322 - RNA, 21 nt, Artificial Sequence
  Guide RNA
cuuaacuuuguugagacacuu

SEQ ID NO: 36323 - RNA, 21 nt, Artificial Sequence
  Guide RNA
cuuaggauccagacuauagaa

SEQ ID NO: 36324 - RNA, 21 nt, Artificial Sequence
  Guide RNA
cuuaugugcaauuagcacaaa

SEQ ID NO: 36325 - RNA, 21 nt, Artificial Sequence
  Guide RNA
cuucagagauagucaccauga

SEQ ID NO: 36326 - RNA, 21 nt, Artificial Sequence
  Guide RNA
cuuccaguaaacauggcccca

SEQ ID NO: 36327 - RNA, 21 nt, Artificial Sequence
  Guide RNA
cuucuucugucuagugaauuu

SEQ ID NO: 36328 - RNA, 21 nt, Artificial Sequence
  Guide RNA
cuucuucuucugucuagugaa

SEQ ID NO: 36329 - RNA, 21 nt, Artificial Sequence
  Guide RNA
cuucuuucuauagucuggauc

SEQ ID NO: 36330 - RNA, 21 nt, Artificial Sequence
  Guide RNA
cuucuuuugaaacugacauug

SEQ ID NO: 36331 - RNA, 21 nt, Artificial Sequence
  Guide RNA
cuuggggccauguuuacugga

SEQ ID NO: 36332 - RNA, 21 nt, Artificial Sequence
  Guide RNA
cuuguccaaagcauuuaggaa

SEQ ID NO: 36333 - RNA, 21 nt, Artificial Sequence
  Guide RNA
cuuucuauagucuggauccua

SEQ ID NO: 36334 - RNA, 21 nt, Artificial Sequence
  Guide RNA
cuuuggacaaguuacggaaua

SEQ ID NO: 36335 - RNA, 21 nt, Artificial Sequence
  Guide RNA
cuuuguugagacacuuuuugg

SEQ ID NO: 36336 - RNA, 21 nt, Artificial Sequence
  Guide RNA
cuuuuagcagcaguuuaugug

SEQ ID NO: 36337 - RNA, 21 nt, Artificial Sequence
  Guide RNA
cuuuucccccuucagagauag

SEQ ID NO: 36338 - RNA, 21 nt, Artificial Sequence
  Guide RNA
cuuuugaaacugacauugcuu

SEQ ID NO: 36339 - RNA, 21 nt, Artificial Sequence
  Guide RNA
cuuuuuggcucaacuuuguug

SEQ ID NO: 36340 - RNA, 21 nt, Artificial Sequence
  Guide RNA
gaaaagucaacaggggacccu

SEQ ID NO: 36341 - RNA, 21 nt, Artificial Sequence
  Guide RNA
gaaaauaaucggugucaguau

SEQ ID NO: 36342 - RNA, 21 nt, Artificial Sequence
  Guide RNA
gaaaauucacuagacagaaga

SEQ ID NO: 36343 - RNA, 21 nt, Artificial Sequence
  Guide RNA
gaaaccaacauuuguuuuguc

SEQ ID NO: 36344 - RNA, 21 nt, Artificial Sequence
  Guide RNA
gaaacugacauugcuuuuagc

SEQ ID NO: 36345 - RNA, 21 nt, Artificial Sequence
  Guide RNA
gaaagugaaggguccccuguu

SEQ ID NO: 36346 - RNA, 21 nt, Artificial Sequence
  Guide RNA
gaaauaccacauaaacugcug

SEQ ID NO: 36347 - RNA, 21 nt, Artificial Sequence
  Guide RNA
gaacacugucaugcacaaucu

SEQ ID NO: 36348 - RNA, 21 nt, Artificial Sequence
  Guide RNA
gaagaagaaguuuacaccuua

SEQ ID NO: 36349 - RNA, 21 nt, Artificial Sequence
  Guide RNA
gaagaugaauuccaucaaugg

SEQ ID NO: 36350 - RNA, 21 nt, Artificial Sequence
  Guide RNA
gaagggggaaaagucaacagg

SEQ ID NO: 36351 - RNA, 21 nt, Artificial Sequence
  Guide RNA
gaaggguccccuguugacuuu

SEQ ID NO: 36352 - RNA, 21 nt, Artificial Sequence
  Guide RNA
gaagguaguaaaauuaagggg

SEQ ID NO: 36353 - RNA, 21 nt, Artificial Sequence
  Guide RNA
gaauacugacaccgauuauuu

SEQ ID NO: 36354 - RNA, 21 nt, Artificial Sequence
  Guide RNA
gaauucaucuuccaguaaaca

SEQ ID NO: 36355 - RNA, 21 nt, Artificial Sequence
  Guide RNA
gaauuccaucaauggccacug

SEQ ID NO: 36356 - RNA, 21 nt, Artificial Sequence
  Guide RNA
gacaaaacaaauguugguuuc

SEQ ID NO: 36357 - RNA, 21 nt, Artificial Sequence
  Guide RNA
gacaaguuacggaauacugac

SEQ ID NO: 36358 - RNA, 21 nt, Artificial Sequence
  Guide RNA
gacaccgauuauuuuccaacu

SEQ ID NO: 36359 - RNA, 21 nt, Artificial Sequence
  Guide RNA
gacacuuuuuggcucaacuuu

SEQ ID NO: 36360 - RNA, 21 nt, Artificial Sequence
  Guide RNA
gacagaagaagaaguuuacac

SEQ ID NO: 36361 - RNA, 21 nt, Artificial Sequence
  Guide RNA
gacaguguucauggugacuau

SEQ ID NO: 36362 - RNA, 21 nt, Artificial Sequence
  Guide RNA
gacauagaaagugaagggucc

SEQ ID NO: 36363 - RNA, 21 nt, Artificial Sequence
  Guide RNA
gacauugcuuuuagcagcagu

SEQ ID NO: 36364 - RNA, 21 nt, Artificial Sequence
  Guide RNA
gacccuucacuuucuauguca

SEQ ID NO: 36365 - RNA, 21 nt, Artificial Sequence
  Guide RNA
gacuaucucugaagggggaaa

SEQ ID NO: 36366 - RNA, 21 nt, Artificial Sequence
  Guide RNA
gacucaacaaaguugagccaa

SEQ ID NO: 36367 - RNA, 21 nt, Artificial Sequence
  Guide RNA
gacuuggggccauguuuacug

SEQ ID NO: 36368 - RNA, 21 nt, Artificial Sequence
  Guide RNA
gacuuuucccccuucagagau

SEQ ID NO: 36369 - RNA, 21 nt, Artificial Sequence
  Guide RNA
gagaaauaccacauaaacugc

SEQ ID NO: 36370 - RNA, 21 nt, Artificial Sequence
  Guide RNA
gagacacuuuuuggcucaacu

SEQ ID NO: 36371 - RNA, 21 nt, Artificial Sequence
  Guide RNA
gagauagucaccaugaacacu

SEQ ID NO: 36372 - RNA, 21 nt, Artificial Sequence
  Guide RNA
gagauugugcaugacaguguu

SEQ ID NO: 36373 - RNA, 21 nt, Artificial Sequence
  Guide RNA
gagccaaaaagugucucaaca

SEQ ID NO: 36374 - RNA, 21 nt, Artificial Sequence
  Guide RNA
gauagucaccaugaacacugu

SEQ ID NO: 36375 - RNA, 21 nt, Artificial Sequence
  Guide RNA
gauauuccuaaaugcuuugga

SEQ ID NO: 36376 - RNA, 21 nt, Artificial Sequence
  Guide RNA
gauccagacuauagaaagaag

SEQ ID NO: 36377 - RNA, 21 nt, Artificial Sequence
  Guide RNA
gaugaauuccaucaauggcca

SEQ ID NO: 36378 - RNA, 21 nt, Artificial Sequence
  Guide RNA
gauggaauucaucuuccagua

SEQ ID NO: 36379 - RNA, 21 nt, Artificial Sequence
  Guide RNA
gauuaagugacuuggggccau

SEQ ID NO: 36380 - RNA, 21 nt, Artificial Sequence
  Guide RNA
gauugugcaugacaguguuca

SEQ ID NO: 36381 - RNA, 21 nt, Artificial Sequence
  Guide RNA
gcaaaacuguauaaaagugcu

SEQ ID NO: 36382 - RNA, 21 nt, Artificial Sequence
  Guide RNA
gcaaugucaguuucaaaagaa

SEQ ID NO: 36383 - RNA, 21 nt, Artificial Sequence
  Guide RNA
gcacaaucucuuagaguuuag

SEQ ID NO: 36384 - RNA, 21 nt, Artificial Sequence
  Guide RNA
gcacauaagagaaauaccaca

SEQ ID NO: 36385 - RNA, 21 nt, Artificial Sequence
  Guide RNA
gcacuuuuauacaguuuugcc

SEQ ID NO: 36386 - RNA, 21 nt, Artificial Sequence
  Guide RNA
gcagcaguuuaugugguauuu

SEQ ID NO: 36387 - RNA, 21 nt, Artificial Sequence
  Guide RNA
gcaguuuaugugguauuucuc

SEQ ID NO: 36388 - RNA, 21 nt, Artificial Sequence
  Guide RNA
gcaugacaguguucaugguga

SEQ ID NO: 36389 - RNA, 21 nt, Artificial Sequence
  Guide RNA
gccaaaaagugucucaacaaa

SEQ ID NO: 36390 - RNA, 21 nt, Artificial Sequence
  Guide RNA
gccacuggaauuauuuguugu

SEQ ID NO: 36391 - RNA, 21 nt, Artificial Sequence
  Guide RNA
gccauguuuacuggaagauga

SEQ ID NO: 36392 - RNA, 21 nt, Artificial Sequence
  Guide RNA
gccauugauggaauucaucuu

SEQ ID NO: 36393 - RNA, 21 nt, Artificial Sequence
  Guide RNA
gccccaagucacuuaaucaac

SEQ ID NO: 36394 - RNA, 21 nt, Artificial Sequence
  Guide RNA
gcuaaaagcaaugucaguuuc

SEQ ID NO: 36395 - RNA, 21 nt, Artificial Sequence
  Guide RNA
gcuaauugcacauaagagaaa

SEQ ID NO: 36396 - RNA, 21 nt, Artificial Sequence
  Guide RNA
gcuaauuuaaaaacguccuga

SEQ ID NO: 36397 - RNA, 21 nt, Artificial Sequence
  Guide RNA
gcucaacuuuguugagucauu

SEQ ID NO: 36398 - RNA, 21 nt, Artificial Sequence
  Guide RNA
gcugcuaaaagcaaugucagu

SEQ ID NO: 36399 - RNA, 21 nt, Artificial Sequence
  Guide RNA
gcuuuggacaaguuacggaau

SEQ ID NO: 36400 - RNA, 21 nt, Artificial Sequence
  Guide RNA
gcuuuuagcagcaguuuaugu

SEQ ID NO: 36401 - RNA, 21 nt, Artificial Sequence
  Guide RNA
ggaaaagucaacaggggaccc

SEQ ID NO: 36402 - RNA, 21 nt, Artificial Sequence
  Guide RNA
ggaaaauaaucggugucagua

SEQ ID NO: 36403 - RNA, 21 nt, Artificial Sequence
  Guide RNA
ggaaaauucacuagacagaag

SEQ ID NO: 36404 - RNA, 21 nt, Artificial Sequence
  Guide RNA
ggaaaccaacauuuguuuugu

SEQ ID NO: 36405 - RNA, 21 nt, Artificial Sequence
  Guide RNA
ggaagaugaauuccaucaaug

SEQ ID NO: 36406 - RNA, 21 nt, Artificial Sequence
  Guide RNA
ggaauacugacaccgauuauu

SEQ ID NO: 36407 - RNA, 21 nt, Artificial Sequence
  Guide RNA
ggaauucaucuuccaguaaac

SEQ ID NO: 36408 - RNA, 21 nt, Artificial Sequence
  Guide RNA
ggacaaguuacggaauacuga

SEQ ID NO: 36409 - RNA, 21 nt, Artificial Sequence
  Guide RNA
ggacccuucacuuucuauguc

SEQ ID NO: 36410 - RNA, 21 nt, Artificial Sequence
  Guide RNA
ggauccagacuauagaaagaa

SEQ ID NO: 36411 - RNA, 21 nt, Artificial Sequence
  Guide RNA
ggauccuaaguuggaaaauaa

SEQ ID NO: 36412 - RNA, 21 nt, Artificial Sequence
  Guide RNA
ggcaaaacuguauaaaagugc

SEQ ID NO: 36413 - RNA, 21 nt, Artificial Sequence
  Guide RNA
ggccacuggaauuauuuguug

SEQ ID NO: 36414 - RNA, 21 nt, Artificial Sequence
  Guide RNA
ggccauguuuacuggaagaug

SEQ ID NO: 36415 - RNA, 21 nt, Artificial Sequence
  Guide RNA
ggccauugauggaauucaucu

SEQ ID NO: 36416 - RNA, 21 nt, Artificial Sequence
  Guide RNA
ggccccaagucacuuaaucaa

SEQ ID NO: 36417 - RNA, 21 nt, Artificial Sequence
  Guide RNA
ggcucaacuuuguugagucau

SEQ ID NO: 36418 - RNA, 21 nt, Artificial Sequence
  Guide RNA
gggaaaagucaacaggggacc

SEQ ID NO: 36419 - RNA, 21 nt, Artificial Sequence
  Guide RNA
gggacccuucacuuucuaugu

SEQ ID NO: 36420 - RNA, 21 nt, Artificial Sequence
  Guide RNA
gggccauguuuacuggaagau

SEQ ID NO: 36421 - RNA, 21 nt, Artificial Sequence
  Guide RNA
ggggaaaagucaacaggggac

SEQ ID NO: 36422 - RNA, 21 nt, Artificial Sequence
  Guide RNA
ggggacccuucacuuucuaug

SEQ ID NO: 36423 - RNA, 21 nt, Artificial Sequence
  Guide RNA
ggggccauguuuacuggaaga

SEQ ID NO: 36424 - RNA, 21 nt, Artificial Sequence
  Guide RNA
gggggaaaagucaacagggga

SEQ ID NO: 36425 - RNA, 21 nt, Artificial Sequence
  Guide RNA
ggguccccuguugacuuuucc

SEQ ID NO: 36426 - RNA, 21 nt, Artificial Sequence
  Guide RNA
gguaguaaaauuaaggggauu

SEQ ID NO: 36427 - RNA, 21 nt, Artificial Sequence
  Guide RNA
gguauuucucuuaugugcaau

SEQ ID NO: 36428 - RNA, 21 nt, Artificial Sequence
  Guide RNA
gguccccuguugacuuuuccc

SEQ ID NO: 36429 - RNA, 21 nt, Artificial Sequence
  Guide RNA
ggugacuaucucugaaggggg

SEQ ID NO: 36430 - RNA, 21 nt, Artificial Sequence
  Guide RNA
gguguaaacuucuucuucugu

SEQ ID NO: 36431 - RNA, 21 nt, Artificial Sequence
  Guide RNA
ggugucaguauuccguaacuu

SEQ ID NO: 36432 - RNA, 21 nt, Artificial Sequence
  Guide RNA
gguugauuaagugacuugggg

SEQ ID NO: 36433 - RNA, 21 nt, Artificial Sequence
  Guide RNA
guaaacauggccccaagucac

SEQ ID NO: 36434 - RNA, 21 nt, Artificial Sequence
  Guide RNA
guaaacuucuucuucugucua

SEQ ID NO: 36435 - RNA, 21 nt, Artificial Sequence
  Guide RNA
guaacuuguccaaagcauuua

SEQ ID NO: 36436 - RNA, 21 nt, Artificial Sequence
  Guide RNA
guaaggaaaauucacuagaca

SEQ ID NO: 36437 - RNA, 21 nt, Artificial Sequence
  Guide RNA
guacugguugauuaagugacu

SEQ ID NO: 36438 - RNA, 21 nt, Artificial Sequence
  Guide RNA
guagaacaccuaucaguuaaa

SEQ ID NO: 36439 - RNA, 21 nt, Artificial Sequence
  Guide RNA
guauuccguaacuuguccaaa

SEQ ID NO: 36440 - RNA, 21 nt, Artificial Sequence
  Guide RNA
gucaaauacuuucaggacguu

SEQ ID NO: 36441 - RNA, 21 nt, Artificial Sequence
  Guide RNA
gucaacaggggacccuucacu

SEQ ID NO: 36442 - RNA, 21 nt, Artificial Sequence
  Guide RNA
gucaccaugaacacugucaug

SEQ ID NO: 36443 - RNA, 21 nt, Artificial Sequence
  Guide RNA
gucacuuaaucaaccaguacu

SEQ ID NO: 36444 - RNA, 21 nt, Artificial Sequence
  Guide RNA
gucaguauuccguaacuuguc

SEQ ID NO: 36445 - RNA, 21 nt, Artificial Sequence
  Guide RNA
gucaugcacaaucucuuagag

SEQ ID NO: 36446 - RNA, 21 nt, Artificial Sequence
  Guide RNA
guccaaagcauuuaggaauau

SEQ ID NO: 36447 - RNA, 21 nt, Artificial Sequence
  Guide RNA
guccccuguugacuuuucccc

SEQ ID NO: 36448 - RNA, 21 nt, Artificial Sequence
  Guide RNA
guccugaaaguauuugacaua

SEQ ID NO: 36449 - RNA, 21 nt, Artificial Sequence
  Guide RNA
gucuggauccuaaguuggaaa

SEQ ID NO: 36450 - RNA, 21 nt, Artificial Sequence
  Guide RNA
gugaaggguccccuguugacu

SEQ ID NO: 36451 - RNA, 21 nt, Artificial Sequence
  Guide RNA
gugacuaucucugaaggggga

SEQ ID NO: 36452 - RNA, 21 nt, Artificial Sequence
  Guide RNA
gugacuuggggccauguuuac

SEQ ID NO: 36453 - RNA, 21 nt, Artificial Sequence
  Guide RNA
gugcaugacaguguucauggu

SEQ ID NO: 36454 - RNA, 21 nt, Artificial Sequence
  Guide RNA
gugcuaauugcacauaagaga

SEQ ID NO: 36455 - RNA, 21 nt, Artificial Sequence
  Guide RNA
guggccauugauggaauucau

SEQ ID NO: 36456 - RNA, 21 nt, Artificial Sequence
  Guide RNA
gugguauuucucuuaugugca

SEQ ID NO: 36457 - RNA, 21 nt, Artificial Sequence
  Guide RNA
guguaaacuucuucuucuguc

SEQ ID NO: 36458 - RNA, 21 nt, Artificial Sequence
  Guide RNA
gugucaguauuccguaacuug

SEQ ID NO: 36459 - RNA, 21 nt, Artificial Sequence
  Guide RNA
gugucucaacaaaguuaagua

SEQ ID NO: 36460 - RNA, 21 nt, Artificial Sequence
  Guide RNA
guguucauggugacuaucucu

SEQ ID NO: 36461 - RNA, 21 nt, Artificial Sequence
  Guide RNA
guuacggaauacugacaccga

SEQ ID NO: 36462 - RNA, 21 nt, Artificial Sequence
  Guide RNA
guucauggugacuaucucuga

SEQ ID NO: 36463 - RNA, 21 nt, Artificial Sequence
  Guide RNA
guugacuuuucccccuucaga

SEQ ID NO: 36464 - RNA, 21 nt, Artificial Sequence
  Guide RNA
guugagacacuuuuuggcuca

SEQ ID NO: 36465 - RNA, 21 nt, Artificial Sequence
  Guide RNA
guugagccaaaaagugucuca

SEQ ID NO: 36466 - RNA, 21 nt, Artificial Sequence
  Guide RNA
guugauuaagugacuuggggc

SEQ ID NO: 36467 - RNA, 21 nt, Artificial Sequence
  Guide RNA
guuggaaaauaaucgguguca

SEQ ID NO: 36468 - RNA, 21 nt, Artificial Sequence
  Guide RNA
guuuacaccuuaaaaguacug

SEQ ID NO: 36469 - RNA, 21 nt, Artificial Sequence
  Guide RNA
guuuacuggaagaugaauucc

SEQ ID NO: 36470 - RNA, 21 nt, Artificial Sequence
  Guide RNA
uaaacauggccccaagucacu

SEQ ID NO: 36471 - RNA, 21 nt, Artificial Sequence
  Guide RNA
uaaacucuaagagauugugca

SEQ ID NO: 36472 - RNA, 21 nt, Artificial Sequence
  Guide RNA
uaaacugcugcuaaaagcaau

SEQ ID NO: 36473 - RNA, 21 nt, Artificial Sequence
  Guide RNA
uaaacuucuucuucugucuag

SEQ ID NO: 36474 - RNA, 21 nt, Artificial Sequence
  Guide RNA
uaaaguagaacaccuaucagu

SEQ ID NO: 36475 - RNA, 21 nt, Artificial Sequence
  Guide RNA
uaaaugcuuuggacaaguuac

SEQ ID NO: 36476 - RNA, 21 nt, Artificial Sequence
  Guide RNA
uaacugauagguguucuacuu

SEQ ID NO: 36477 - RNA, 21 nt, Artificial Sequence
  Guide RNA
uaacuuguccaaagcauuuag

SEQ ID NO: 36478 - RNA, 21 nt, Artificial Sequence
  Guide RNA
uaagagauugugcaugacagu

SEQ ID NO: 36479 - RNA, 21 nt, Artificial Sequence
  Guide RNA
uaaggaaaauucacuagacag

SEQ ID NO: 36480 - RNA, 21 nt, Artificial Sequence
  Guide RNA
uaagguguaaacuucuucuuc

SEQ ID NO: 36481 - RNA, 21 nt, Artificial Sequence
  Guide RNA
uaagugacuuggggccauguu

SEQ ID NO: 36482 - RNA, 21 nt, Artificial Sequence
  Guide RNA
uaaguuggaaaauaaucggug

SEQ ID NO: 36483 - RNA, 21 nt, Artificial Sequence
  Guide RNA
uaaucggugucaguauuccgu

SEQ ID NO: 36484 - RNA, 21 nt, Artificial Sequence
  Guide RNA
uaauuccaguggccauugaug

SEQ ID NO: 36485 - RNA, 21 nt, Artificial Sequence
  Guide RNA
uacaacaaauaauuccagugg

SEQ ID NO: 36486 - RNA, 21 nt, Artificial Sequence
  Guide RNA
uacaccuuaaaaguacugguu

SEQ ID NO: 36487 - RNA, 21 nt, Artificial Sequence
  Guide RNA
uaccacauaaacugcugcuaa

SEQ ID NO: 36488 - RNA, 21 nt, Artificial Sequence
  Guide RNA
uacggaauacugacaccgauu

SEQ ID NO: 36489 - RNA, 21 nt, Artificial Sequence
  Guide RNA
uacugacaccgauuauuuucc

SEQ ID NO: 36490 - RNA, 21 nt, Artificial Sequence
  Guide RNA
uacuggaagaugaauuccauc

SEQ ID NO: 36491 - RNA, 21 nt, Artificial Sequence
  Guide RNA
uacugguugauuaagugacuu

SEQ ID NO: 36492 - RNA, 21 nt, Artificial Sequence
  Guide RNA
uacuuaacuuuguugagacac

SEQ ID NO: 36493 - RNA, 21 nt, Artificial Sequence
  Guide RNA
uacuucuuucuauagucugga

SEQ ID NO: 36494 - RNA, 21 nt, Artificial Sequence
  Guide RNA
uagaaagugaaggguccccug

SEQ ID NO: 36495 - RNA, 21 nt, Artificial Sequence
  Guide RNA
uagacagaagaagaaguuuac

SEQ ID NO: 36496 - RNA, 21 nt, Artificial Sequence
  Guide RNA
uagcagcaguuuaugugguau

SEQ ID NO: 36497 - RNA, 21 nt, Artificial Sequence
  Guide RNA
uaggauccagacuauagaaag

SEQ ID NO: 36498 - RNA, 21 nt, Artificial Sequence
  Guide RNA
uagucaccaugaacacuguca

SEQ ID NO: 36499 - RNA, 21 nt, Artificial Sequence
  Guide RNA
uagucuggauccuaaguugga

SEQ ID NO: 36500 - RNA, 21 nt, Artificial Sequence
  Guide RNA
uauagucuggauccuaaguug

SEQ ID NO: 36501 - RNA, 21 nt, Artificial Sequence
  Guide RNA
uaucucugaagggggaaaagu

SEQ ID NO: 36502 - RNA, 21 nt, Artificial Sequence
  Guide RNA
uaugucaaauacuuucaggac

SEQ ID NO: 36503 - RNA, 21 nt, Artificial Sequence
  Guide RNA
uauuccguaacuuguccaaag

SEQ ID NO: 36504 - RNA, 21 nt, Artificial Sequence
  Guide RNA
uauuccuaaaugcuuuggaca

SEQ ID NO: 36505 - RNA, 21 nt, Artificial Sequence
  Guide RNA
uauuuuccaacuuaggaucca

SEQ ID NO: 36506 - RNA, 21 nt, Artificial Sequence
  Guide RNA
ucaaauacuuucaggacguuu

SEQ ID NO: 36507 - RNA, 21 nt, Artificial Sequence
  Guide RNA
ucaacaaaguugagccaaaaa

SEQ ID NO: 36508 - RNA, 21 nt, Artificial Sequence
  Guide RNA
ucaacaggggacccuucacuu

SEQ ID NO: 36509 - RNA, 21 nt, Artificial Sequence
  Guide RNA
ucaaccaguacuuuuaaggug

SEQ ID NO: 36510 - RNA, 21 nt, Artificial Sequence
  Guide RNA
ucaauggccacuggaauuauu

SEQ ID NO: 36511 - RNA, 21 nt, Artificial Sequence
  Guide RNA
ucaccaugaacacugucaugc

SEQ ID NO: 36512 - RNA, 21 nt, Artificial Sequence
  Guide RNA
ucacuagacagaagaagaagu

SEQ ID NO: 36513 - RNA, 21 nt, Artificial Sequence
  Guide RNA
ucacuuaaucaaccaguacuu

SEQ ID NO: 36514 - RNA, 21 nt, Artificial Sequence
  Guide RNA
ucagagauagucaccaugaac

SEQ ID NO: 36515 - RNA, 21 nt, Artificial Sequence
  Guide RNA
ucaguauuccguaacuugucc

SEQ ID NO: 36516 - RNA, 21 nt, Artificial Sequence
  Guide RNA
ucaucuuccaguaaacauggc

SEQ ID NO: 36517 - RNA, 21 nt, Artificial Sequence
  Guide RNA
ucaugcacaaucucuuagagu

SEQ ID NO: 36518 - RNA, 21 nt, Artificial Sequence
  Guide RNA
ucauggugacuaucucugaag

SEQ ID NO: 36519 - RNA, 21 nt, Artificial Sequence
  Guide RNA
uccaaagcauuuaggaauauc

SEQ ID NO: 36520 - RNA, 21 nt, Artificial Sequence
  Guide RNA
uccaacuuaggauccagacua

SEQ ID NO: 36521 - RNA, 21 nt, Artificial Sequence
  Guide RNA
uccagacuauagaaagaagua

SEQ ID NO: 36522 - RNA, 21 nt, Artificial Sequence
  Guide RNA
uccaguaaacauggccccaag

SEQ ID NO: 36523 - RNA, 21 nt, Artificial Sequence
  Guide RNA
uccaguggccauugauggaau

SEQ ID NO: 36524 - RNA, 21 nt, Artificial Sequence
  Guide RNA
uccaucaauggccacuggaau

SEQ ID NO: 36525 - RNA, 21 nt, Artificial Sequence
  Guide RNA
ucccccuucagagauagucac

SEQ ID NO: 36526 - RNA, 21 nt, Artificial Sequence
  Guide RNA
uccccuguugacuuuuccccc

SEQ ID NO: 36527 - RNA, 21 nt, Artificial Sequence
  Guide RNA
uccccuuaauuuuacuaccuu

SEQ ID NO: 36528 - RNA, 21 nt, Artificial Sequence
  Guide RNA
uccguaacuuguccaaagcau

SEQ ID NO: 36529 - RNA, 21 nt, Artificial Sequence
  Guide RNA
uccuaaaugcuuuggacaagu

SEQ ID NO: 36530 - RNA, 21 nt, Artificial Sequence
  Guide RNA
uccuaaguuggaaaauaaucg

SEQ ID NO: 36531 - RNA, 21 nt, Artificial Sequence
  Guide RNA
uccugaaaguauuugacauag

SEQ ID NO: 36532 - RNA, 21 nt, Artificial Sequence
  Guide RNA
ucggugucaguauuccguaac

SEQ ID NO: 36533 - RNA, 21 nt, Artificial Sequence
  Guide RNA
ucuaaacucuaagagauugug

SEQ ID NO: 36534 - RNA, 21 nt, Artificial Sequence
  Guide RNA
ucuaagagauugugcaugaca

SEQ ID NO: 36535 - RNA, 21 nt, Artificial Sequence
  Guide RNA
ucuauagucuggauccuaagu

SEQ ID NO: 36536 - RNA, 21 nt, Artificial Sequence
  Guide RNA
ucuaugucaaauacuuucagg

SEQ ID NO: 36537 - RNA, 21 nt, Artificial Sequence
  Guide RNA
ucucugaagggggaaaaguca

SEQ ID NO: 36538 - RNA, 21 nt, Artificial Sequence
  Guide RNA
ucucuuaugugcaauuagcac

SEQ ID NO: 36539 - RNA, 21 nt, Artificial Sequence
  Guide RNA
ucugaagggggaaaagucaac

SEQ ID NO: 36540 - RNA, 21 nt, Artificial Sequence
  Guide RNA
ucuggauccuaaguuggaaaa

SEQ ID NO: 36541 - RNA, 21 nt, Artificial Sequence
  Guide RNA
ucuuaugugcaauuagcacaa

SEQ ID NO: 36542 - RNA, 21 nt, Artificial Sequence
  Guide RNA
ucuuccaguaaacauggcccc

SEQ ID NO: 36543 - RNA, 21 nt, Artificial Sequence
  Guide RNA
ucuucugucuagugaauuuuc

SEQ ID NO: 36544 - RNA, 21 nt, Artificial Sequence
  Guide RNA
ucuucuucugucuagugaauu

SEQ ID NO: 36545 - RNA, 21 nt, Artificial Sequence
  Guide RNA
ucuuucuauagucuggauccu

SEQ ID NO: 36546 - RNA, 21 nt, Artificial Sequence
  Guide RNA
ucuuuugaaacugacauugcu

SEQ ID NO: 36547 - RNA, 21 nt, Artificial Sequence
  Guide RNA
ugaaacugacauugcuuuuag

SEQ ID NO: 36548 - RNA, 21 nt, Artificial Sequence
  Guide RNA
ugaacacugucaugcacaauc

SEQ ID NO: 36549 - RNA, 21 nt, Artificial Sequence
  Guide RNA
ugaagggggaaaagucaacag

SEQ ID NO: 36550 - RNA, 21 nt, Artificial Sequence
  Guide RNA
ugaaggguccccuguugacuu

SEQ ID NO: 36551 - RNA, 21 nt, Artificial Sequence
  Guide RNA
ugaauuccaucaauggccacu

SEQ ID NO: 36552 - RNA, 21 nt, Artificial Sequence
  Guide RNA
ugacaccgauuauuuuccaac

SEQ ID NO: 36553 - RNA, 21 nt, Artificial Sequence
  Guide RNA
ugacaguguucauggugacua

SEQ ID NO: 36554 - RNA, 21 nt, Artificial Sequence
  Guide RNA
ugacauagaaagugaaggguc

SEQ ID NO: 36555 - RNA, 21 nt, Artificial Sequence
  Guide RNA
ugacauugcuuuuagcagcag

SEQ ID NO: 36556 - RNA, 21 nt, Artificial Sequence
  Guide RNA
ugacuaucucugaagggggaa

SEQ ID NO: 36557 - RNA, 21 nt, Artificial Sequence
  Guide RNA
ugacucaacaaaguugagcca

SEQ ID NO: 36558 - RNA, 21 nt, Artificial Sequence
  Guide RNA
ugacuuggggccauguuuacu

SEQ ID NO: 36559 - RNA, 21 nt, Artificial Sequence
  Guide RNA
ugacuuuucccccuucagaga

SEQ ID NO: 36560 - RNA, 21 nt, Artificial Sequence
  Guide RNA
ugagacacuuuuuggcucaac

SEQ ID NO: 36561 - RNA, 21 nt, Artificial Sequence
  Guide RNA
ugagccaaaaagugucucaac

SEQ ID NO: 36562 - RNA, 21 nt, Artificial Sequence
  Guide RNA
ugauggaauucaucuuccagu

SEQ ID NO: 36563 - RNA, 21 nt, Artificial Sequence
  Guide RNA
ugauuaagugacuuggggcca

SEQ ID NO: 36564 - RNA, 21 nt, Artificial Sequence
  Guide RNA
ugcacaaucucuuagaguuua

SEQ ID NO: 36565 - RNA, 21 nt, Artificial Sequence
  Guide RNA
ugcacauaagagaaauaccac

SEQ ID NO: 36566 - RNA, 21 nt, Artificial Sequence
  Guide RNA
ugcaugacaguguucauggug

SEQ ID NO: 36567 - RNA, 21 nt, Artificial Sequence
  Guide RNA
ugcuaaaagcaaugucaguuu

SEQ ID NO: 36568 - RNA, 21 nt, Artificial Sequence
  Guide RNA
ugcuaauugcacauaagagaa

SEQ ID NO: 36569 - RNA, 21 nt, Artificial Sequence
  Guide RNA
ugcuaauuuaaaaacguccug

SEQ ID NO: 36570 - RNA, 21 nt, Artificial Sequence
  Guide RNA
ugcugcuaaaagcaaugucag

SEQ ID NO: 36571 - RNA, 21 nt, Artificial Sequence
  Guide RNA
ugcuuuggacaaguuacggaa

SEQ ID NO: 36572 - RNA, 21 nt, Artificial Sequence
  Guide RNA
ugcuuuuagcagcaguuuaug

SEQ ID NO: 36573 - RNA, 21 nt, Artificial Sequence
  Guide RNA
uggaaaauaaucggugucagu

SEQ ID NO: 36574 - RNA, 21 nt, Artificial Sequence
  Guide RNA
uggaagaugaauuccaucaau

SEQ ID NO: 36575 - RNA, 21 nt, Artificial Sequence
  Guide RNA
uggaauucaucuuccaguaaa

SEQ ID NO: 36576 - RNA, 21 nt, Artificial Sequence
  Guide RNA
uggacaaguuacggaauacug

SEQ ID NO: 36577 - RNA, 21 nt, Artificial Sequence
  Guide RNA
uggauccuaaguuggaaaaua

SEQ ID NO: 36578 - RNA, 21 nt, Artificial Sequence
  Guide RNA
uggcaaaacuguauaaaagug

SEQ ID NO: 36579 - RNA, 21 nt, Artificial Sequence
  Guide RNA
uggccacuggaauuauuuguu

SEQ ID NO: 36580 - RNA, 21 nt, Artificial Sequence
  Guide RNA
uggccauugauggaauucauc

SEQ ID NO: 36581 - RNA, 21 nt, Artificial Sequence
  Guide RNA
uggccccaagucacuuaauca

SEQ ID NO: 36582 - RNA, 21 nt, Artificial Sequence
  Guide RNA
uggcucaacuuuguugaguca

SEQ ID NO: 36583 - RNA, 21 nt, Artificial Sequence
  Guide RNA
uggggccauguuuacuggaag

SEQ ID NO: 36584 - RNA, 21 nt, Artificial Sequence
  Guide RNA
ugguauuucucuuaugugcaa

SEQ ID NO: 36585 - RNA, 21 nt, Artificial Sequence
  Guide RNA
uggugacuaucucugaagggg

SEQ ID NO: 36586 - RNA, 21 nt, Artificial Sequence
  Guide RNA
ugguugauuaagugacuuggg

SEQ ID NO: 36587 - RNA, 21 nt, Artificial Sequence
  Guide RNA
uguaaacuucuucuucugucu

SEQ ID NO: 36588 - RNA, 21 nt, Artificial Sequence
  Guide RNA
ugucaaauacuuucaggacgu

SEQ ID NO: 36589 - RNA, 21 nt, Artificial Sequence
  Guide RNA
ugucaguauuccguaacuugu

SEQ ID NO: 36590 - RNA, 21 nt, Artificial Sequence
  Guide RNA
ugucaugcacaaucucuuaga

SEQ ID NO: 36591 - RNA, 21 nt, Artificial Sequence
  Guide RNA
uguccaaagcauuuaggaaua

SEQ ID NO: 36592 - RNA, 21 nt, Artificial Sequence
  Guide RNA
ugugcaugacaguguucaugg

SEQ ID NO: 36593 - RNA, 21 nt, Artificial Sequence
  Guide RNA
ugugcuaauugcacauaagag

SEQ ID NO: 36594 - RNA, 21 nt, Artificial Sequence
  Guide RNA
ugugguauuucucuuaugugc

SEQ ID NO: 36595 - RNA, 21 nt, Artificial Sequence
  Guide RNA
uguucauggugacuaucucug

SEQ ID NO: 36596 - RNA, 21 nt, Artificial Sequence
  Guide RNA
uguugacuuuucccccuucag

SEQ ID NO: 36597 - RNA, 21 nt, Artificial Sequence
  Guide RNA
uguugagacacuuuuuggcuc

SEQ ID NO: 36598 - RNA, 21 nt, Artificial Sequence
  Guide RNA
uguuuacuggaagaugaauuc

SEQ ID NO: 36599 - RNA, 21 nt, Artificial Sequence
  Guide RNA
uuaaaguagaacaccuaucag

SEQ ID NO: 36600 - RNA, 21 nt, Artificial Sequence
  Guide RNA
uuaacugauagguguucuacu

SEQ ID NO: 36601 - RNA, 21 nt, Artificial Sequence
  Guide RNA
uuaagugacuuggggccaugu

SEQ ID NO: 36602 - RNA, 21 nt, Artificial Sequence
  Guide RNA
uuacaccuuaaaaguacuggu

SEQ ID NO: 36603 - RNA, 21 nt, Artificial Sequence
  Guide RNA
uuacggaauacugacaccgau

SEQ ID NO: 36604 - RNA, 21 nt, Artificial Sequence
  Guide RNA
uuacuggaagaugaauuccau

SEQ ID NO: 36605 - RNA, 21 nt, Artificial Sequence
  Guide RNA
uuacuucuuucuauagucugg

SEQ ID NO: 36606 - RNA, 21 nt, Artificial Sequence
  Guide RNA
uuagcagcaguuuauguggua

SEQ ID NO: 36607 - RNA, 21 nt, Artificial Sequence
  Guide RNA
uuaggauccagacuauagaaa

SEQ ID NO: 36608 - RNA, 21 nt, Artificial Sequence
  Guide RNA
uuauuuuccaacuuaggaucc

SEQ ID NO: 36609 - RNA, 21 nt, Artificial Sequence
  Guide RNA
uucacuagacagaagaagaag

SEQ ID NO: 36610 - RNA, 21 nt, Artificial Sequence
  Guide RNA
uucagagauagucaccaugaa

SEQ ID NO: 36611 - RNA, 21 nt, Artificial Sequence
  Guide RNA
uucaucuuccaguaaacaugg

SEQ ID NO: 36612 - RNA, 21 nt, Artificial Sequence
  Guide RNA
uucauggugacuaucucugaa

SEQ ID NO: 36613 - RNA, 21 nt, Artificial Sequence
  Guide RNA
uuccaacuuaggauccagacu

SEQ ID NO: 36614 - RNA, 21 nt, Artificial Sequence
  Guide RNA
uuccaguaaacauggccccaa

SEQ ID NO: 36615 - RNA, 21 nt, Artificial Sequence
  Guide RNA
uuccaguggccauugauggaa

SEQ ID NO: 36616 - RNA, 21 nt, Artificial Sequence
  Guide RNA
uuccaucaauggccacuggaa

SEQ ID NO: 36617 - RNA, 21 nt, Artificial Sequence
  Guide RNA
uucccccuucagagauaguca

SEQ ID NO: 36618 - RNA, 21 nt, Artificial Sequence
  Guide RNA
uuccguaacuuguccaaagca

SEQ ID NO: 36619 - RNA, 21 nt, Artificial Sequence
  Guide RNA
uuccuaaaugcuuuggacaag

SEQ ID NO: 36620 - RNA, 21 nt, Artificial Sequence
  Guide RNA
uucuauagucuggauccuaag

SEQ ID NO: 36621 - RNA, 21 nt, Artificial Sequence
  Guide RNA
uucucuuaugugcaauuagca

SEQ ID NO: 36622 - RNA, 21 nt, Artificial Sequence
  Guide RNA
uucuucuucugucuagugaau

SEQ ID NO: 36623 - RNA, 21 nt, Artificial Sequence
  Guide RNA
uucuuucuauagucuggaucc

SEQ ID NO: 36624 - RNA, 21 nt, Artificial Sequence
  Guide RNA
uucuuuugaaacugacauugc

SEQ ID NO: 36625 - RNA, 21 nt, Artificial Sequence
  Guide RNA
uugacauagaaagugaagggu

SEQ ID NO: 36626 - RNA, 21 nt, Artificial Sequence
  Guide RNA
uugacuuuucccccuucagag

SEQ ID NO: 36627 - RNA, 21 nt, Artificial Sequence
  Guide RNA
uugagacacuuuuuggcucaa

SEQ ID NO: 36628 - RNA, 21 nt, Artificial Sequence
  Guide RNA
uugagccaaaaagugucucaa

SEQ ID NO: 36629 - RNA, 21 nt, Artificial Sequence
  Guide RNA
uugauggaauucaucuuccag

SEQ ID NO: 36630 - RNA, 21 nt, Artificial Sequence
  Guide RNA
uugauuaagugacuuggggcc

SEQ ID NO: 36631 - RNA, 21 nt, Artificial Sequence
  Guide RNA
uugcacauaagagaaauacca

SEQ ID NO: 36632 - RNA, 21 nt, Artificial Sequence
  Guide RNA
uugcuuuuagcagcaguuuau

SEQ ID NO: 36633 - RNA, 21 nt, Artificial Sequence
  Guide RNA
uuggaaaauaaucggugucag

SEQ ID NO: 36634 - RNA, 21 nt, Artificial Sequence
  Guide RNA
uuggacaaguuacggaauacu

SEQ ID NO: 36635 - RNA, 21 nt, Artificial Sequence
  Guide RNA
uuggcucaacuuuguugaguc

SEQ ID NO: 36636 - RNA, 21 nt, Artificial Sequence
  Guide RNA
uuggggccauguuuacuggaa

SEQ ID NO: 36637 - RNA, 21 nt, Artificial Sequence
  Guide RNA
uuguccaaagcauuuaggaau

SEQ ID NO: 36638 - RNA, 21 nt, Artificial Sequence
  Guide RNA
uugugcaugacaguguucaug

SEQ ID NO: 36639 - RNA, 21 nt, Artificial Sequence
  Guide RNA
uugugcuaauugcacauaaga

SEQ ID NO: 36640 - RNA, 21 nt, Artificial Sequence
  Guide RNA
uuguugagacacuuuuuggcu

SEQ ID NO: 36641 - RNA, 21 nt, Artificial Sequence
  Guide RNA
uuuaacugauagguguucuac

SEQ ID NO: 36642 - RNA, 21 nt, Artificial Sequence
  Guide RNA
uuuacaccuuaaaaguacugg

SEQ ID NO: 36643 - RNA, 21 nt, Artificial Sequence
  Guide RNA
uuuacuggaagaugaauucca

SEQ ID NO: 36644 - RNA, 21 nt, Artificial Sequence
  Guide RNA
uuuagcagcaguuuauguggu

SEQ ID NO: 36645 - RNA, 21 nt, Artificial Sequence
  Guide RNA
uuuccaacuuaggauccagac

SEQ ID NO: 36646 - RNA, 21 nt, Artificial Sequence
  Guide RNA
uuucccccuucagagauaguc

SEQ ID NO: 36647 - RNA, 21 nt, Artificial Sequence
  Guide RNA
uuucuauagucuggauccuaa

SEQ ID NO: 36648 - RNA, 21 nt, Artificial Sequence
  Guide RNA
uuucucuuaugugcaauuagc

SEQ ID NO: 36649 - RNA, 21 nt, Artificial Sequence
  Guide RNA
uuugacauagaaagugaaggg

SEQ ID NO: 36650 - RNA, 21 nt, Artificial Sequence
  Guide RNA
uuuggacaaguuacggaauac

SEQ ID NO: 36651 - RNA, 21 nt, Artificial Sequence
  Guide RNA
uuuggcucaacuuuguugagu

SEQ ID NO: 36652 - RNA, 21 nt, Artificial Sequence
  Guide RNA
uuugugcuaauugcacauaag

SEQ ID NO: 36653 - RNA, 21 nt, Artificial Sequence
  Guide RNA
uuuguugagacacuuuuuggc

SEQ ID NO: 36654 - RNA, 21 nt, Artificial Sequence
  Guide RNA
uuuuagcagcaguuuaugugg

SEQ ID NO: 36655 - RNA, 21 nt, Artificial Sequence
  Guide RNA
uuuuccaacuuaggauccaga

SEQ ID NO: 36656 - RNA, 21 nt, Artificial Sequence
  Guide RNA
uuuucccccuucagagauagu

SEQ ID NO: 36657 - RNA, 21 nt, Artificial Sequence
  Guide RNA
uuuuggcucaacuuuguugag

SEQ ID NO: 36658 - RNA, 21 nt, Artificial Sequence
  Guide RNA
uuuuuggcucaacuuuguuga

SEQ ID NO: 36659 - RNA, 22 nt, Artificial Sequence
  Guide RNA
aaaaacguccugaaaguauuug

SEQ ID NO: 36660 - RNA, 22 nt, Artificial Sequence
  Guide RNA
aaaacguccugaaaguauuuga

SEQ ID NO: 36661 - RNA, 22 nt, Artificial Sequence
  Guide RNA
aaaaguacugguugauuaagug

SEQ ID NO: 36662 - RNA, 22 nt, Artificial Sequence
  Guide RNA
aaaagucaacaggggacccuuc

SEQ ID NO: 36663 - RNA, 22 nt, Artificial Sequence
  Guide RNA
aaaauaaucggugucaguauuc

SEQ ID NO: 36664 - RNA, 22 nt, Artificial Sequence
  Guide RNA
aaaaugacucaacaaaguugag

SEQ ID NO: 36665 - RNA, 22 nt, Artificial Sequence
  Guide RNA
aaaauucacuagacagaagaag

SEQ ID NO: 36666 - RNA, 22 nt, Artificial Sequence
  Guide RNA
aaacagacaaaacaaauguugg

SEQ ID NO: 36667 - RNA, 22 nt, Artificial Sequence
  Guide RNA
aaacauggccccaagucacuua

SEQ ID NO: 36668 - RNA, 22 nt, Artificial Sequence
  Guide RNA
aaaccaacauuuguuuugucug

SEQ ID NO: 36669 - RNA, 22 nt, Artificial Sequence
  Guide RNA
aaacguccugaaaguauuugac

SEQ ID NO: 36670 - RNA, 22 nt, Artificial Sequence
  Guide RNA
aaacucuaagagauugugcaug

SEQ ID NO: 36671 - RNA, 22 nt, Artificial Sequence
  Guide RNA
aaacugacauugcuuuuagcag

SEQ ID NO: 36672 - RNA, 22 nt, Artificial Sequence
  Guide RNA
aaacugcugcuaaaagcaaugu

SEQ ID NO: 36673 - RNA, 22 nt, Artificial Sequence
  Guide RNA
aaacuucuucuucugucuagug

SEQ ID NO: 36674 - RNA, 22 nt, Artificial Sequence
  Guide RNA
aaagcaaugucaguuucaaaag

SEQ ID NO: 36675 - RNA, 22 nt, Artificial Sequence
  Guide RNA
aaaguacugguugauuaaguga

SEQ ID NO: 36676 - RNA, 22 nt, Artificial Sequence
  Guide RNA
aaaguagaacaccuaucaguua

SEQ ID NO: 36677 - RNA, 22 nt, Artificial Sequence
  Guide RNA
aaagucaacaggggacccuuca

SEQ ID NO: 36678 - RNA, 22 nt, Artificial Sequence
  Guide RNA
aaagugaaggguccccuguuga

SEQ ID NO: 36679 - RNA, 22 nt, Artificial Sequence
  Guide RNA
aaagugucucaacaaaguuaag

SEQ ID NO: 36680 - RNA, 22 nt, Artificial Sequence
  Guide RNA
aaaguugagccaaaaagugucu

SEQ ID NO: 36681 - RNA, 22 nt, Artificial Sequence
  Guide RNA
aaauaaucggugucaguauucc

SEQ ID NO: 36682 - RNA, 22 nt, Artificial Sequence
  Guide RNA
aaauaauuccaguggccauuga

SEQ ID NO: 36683 - RNA, 22 nt, Artificial Sequence
  Guide RNA
aaauaccacauaaacugcugcu

SEQ ID NO: 36684 - RNA, 22 nt, Artificial Sequence
  Guide RNA
aaauccccuuaauuuuacuacc

SEQ ID NO: 36685 - RNA, 22 nt, Artificial Sequence
  Guide RNA
aaaugacucaacaaaguugagc

SEQ ID NO: 36686 - RNA, 22 nt, Artificial Sequence
  Guide RNA
aaaugcuuuggacaaguuacgg

SEQ ID NO: 36687 - RNA, 22 nt, Artificial Sequence
  Guide RNA
aaauucacuagacagaagaaga

SEQ ID NO: 36688 - RNA, 22 nt, Artificial Sequence
  Guide RNA
aacaaaguugagccaaaaagug

SEQ ID NO: 36689 - RNA, 22 nt, Artificial Sequence
  Guide RNA
aacaaauaauuccaguggccau

SEQ ID NO: 36690 - RNA, 22 nt, Artificial Sequence
  Guide RNA
aacacugucaugcacaaucucu

SEQ ID NO: 36691 - RNA, 22 nt, Artificial Sequence
  Guide RNA
aacagacaaaacaaauguuggu

SEQ ID NO: 36692 - RNA, 22 nt, Artificial Sequence
  Guide RNA
aacaggggacccuucacuuucu

SEQ ID NO: 36693 - RNA, 22 nt, Artificial Sequence
  Guide RNA
aacauggccccaagucacuuaa

SEQ ID NO: 36694 - RNA, 22 nt, Artificial Sequence
  Guide RNA
aaccaacauuuguuuugucugu

SEQ ID NO: 36695 - RNA, 22 nt, Artificial Sequence
  Guide RNA
aaccaguacuuuuaagguguaa

SEQ ID NO: 36696 - RNA, 22 nt, Artificial Sequence
  Guide RNA
aacguccugaaaguauuugaca

SEQ ID NO: 36697 - RNA, 22 nt, Artificial Sequence
  Guide RNA
aacucuaagagauugugcauga

SEQ ID NO: 36698 - RNA, 22 nt, Artificial Sequence
  Guide RNA
aacugacauugcuuuuagcagc

SEQ ID NO: 36699 - RNA, 22 nt, Artificial Sequence
  Guide RNA
aacugauagguguucuacuuua

SEQ ID NO: 36700 - RNA, 22 nt, Artificial Sequence
  Guide RNA
aacugcugcuaaaagcaauguc

SEQ ID NO: 36701 - RNA, 22 nt, Artificial Sequence
  Guide RNA
aacuuaggauccagacuauaga

SEQ ID NO: 36702 - RNA, 22 nt, Artificial Sequence
  Guide RNA
aacuucuucuucugucuaguga

SEQ ID NO: 36703 - RNA, 22 nt, Artificial Sequence
  Guide RNA
aacuuguccaaagcauuuagga

SEQ ID NO: 36704 - RNA, 22 nt, Artificial Sequence
  Guide RNA
aacuuuguugagacacuuuuug

SEQ ID NO: 36705 - RNA, 22 nt, Artificial Sequence
  Guide RNA
aagaagguaguaaaauuaaggg

SEQ ID NO: 36706 - RNA, 22 nt, Artificial Sequence
  Guide RNA
aagagaaauaccacauaaacug

SEQ ID NO: 36707 - RNA, 22 nt, Artificial Sequence
  Guide RNA
aagagauugugcaugacagugu

SEQ ID NO: 36708 - RNA, 22 nt, Artificial Sequence
  Guide RNA
aagaugaauuccaucaauggcc

SEQ ID NO: 36709 - RNA, 22 nt, Artificial Sequence
  Guide RNA
aagcaaugucaguuucaaaaga

SEQ ID NO: 36710 - RNA, 22 nt, Artificial Sequence
  Guide RNA
aagcacuuuuauacaguuuugc

SEQ ID NO: 36711 - RNA, 22 nt, Artificial Sequence
  Guide RNA
aaggaaaauucacuagacagaa

SEQ ID NO: 36712 - RNA, 22 nt, Artificial Sequence
  Guide RNA
aaggaaaccaacauuuguuuug

SEQ ID NO: 36713 - RNA, 22 nt, Artificial Sequence
  Guide RNA
aagggggaaaagucaacagggg

SEQ ID NO: 36714 - RNA, 22 nt, Artificial Sequence
  Guide RNA
aaggguccccuguugacuuuuc

SEQ ID NO: 36715 - RNA, 22 nt, Artificial Sequence
  Guide RNA
aagguaguaaaauuaaggggau

SEQ ID NO: 36716 - RNA, 22 nt, Artificial Sequence
  Guide RNA
aagguguaaacuucuucuucug

SEQ ID NO: 36717 - RNA, 22 nt, Artificial Sequence
  Guide RNA
aaguacugguugauuaagugac

SEQ ID NO: 36718 - RNA, 22 nt, Artificial Sequence
  Guide RNA
aaguagaacaccuaucaguuaa

SEQ ID NO: 36719 - RNA, 22 nt, Artificial Sequence
  Guide RNA
aagucaacaggggacccuucac

SEQ ID NO: 36720 - RNA, 22 nt, Artificial Sequence
  Guide RNA
aagucacuuaaucaaccaguac

SEQ ID NO: 36721 - RNA, 22 nt, Artificial Sequence
  Guide RNA
aagugaaggguccccuguugac

SEQ ID NO: 36722 - RNA, 22 nt, Artificial Sequence
  Guide RNA
aagugacuuggggccauguuua

SEQ ID NO: 36723 - RNA, 22 nt, Artificial Sequence
  Guide RNA
aagugucucaacaaaguuaagu

SEQ ID NO: 36724 - RNA, 22 nt, Artificial Sequence
  Guide RNA
aaguuacggaauacugacaccg

SEQ ID NO: 36725 - RNA, 22 nt, Artificial Sequence
  Guide RNA
aaguugagccaaaaagugucuc

SEQ ID NO: 36726 - RNA, 22 nt, Artificial Sequence
  Guide RNA
aaguuggaaaauaaucgguguc

SEQ ID NO: 36727 - RNA, 22 nt, Artificial Sequence
  Guide RNA
aauaaucggugucaguauuccg

SEQ ID NO: 36728 - RNA, 22 nt, Artificial Sequence
  Guide RNA
aauaauuccaguggccauugau

SEQ ID NO: 36729 - RNA, 22 nt, Artificial Sequence
  Guide RNA
aauaccacauaaacugcugcua

SEQ ID NO: 36730 - RNA, 22 nt, Artificial Sequence
  Guide RNA
aauacugacaccgauuauuuuc

SEQ ID NO: 36731 - RNA, 22 nt, Artificial Sequence
  Guide RNA
aaucaaccaguacuuuuaaggu

SEQ ID NO: 36732 - RNA, 22 nt, Artificial Sequence
  Guide RNA
aauccccuuaauuuuacuaccu

SEQ ID NO: 36733 - RNA, 22 nt, Artificial Sequence
  Guide RNA
aaucggugucaguauuccguaa

SEQ ID NO: 36734 - RNA, 22 nt, Artificial Sequence
  Guide RNA
aaugacucaacaaaguugagcc

SEQ ID NO: 36735 - RNA, 22 nt, Artificial Sequence
  Guide RNA
aaugcuuuggacaaguuacgga

SEQ ID NO: 36736 - RNA, 22 nt, Artificial Sequence
  Guide RNA
aauggccacuggaauuauuugu

SEQ ID NO: 36737 - RNA, 22 nt, Artificial Sequence
  Guide RNA
aauucacuagacagaagaagaa

SEQ ID NO: 36738 - RNA, 22 nt, Artificial Sequence
  Guide RNA
aauucaucuuccaguaaacaug

SEQ ID NO: 36739 - RNA, 22 nt, Artificial Sequence
  Guide RNA
aauuccaguggccauugaugga

SEQ ID NO: 36740 - RNA, 22 nt, Artificial Sequence
  Guide RNA
aauuccaucaauggccacugga

SEQ ID NO: 36741 - RNA, 22 nt, Artificial Sequence
  Guide RNA
aauugcacauaagagaaauacc

SEQ ID NO: 36742 - RNA, 22 nt, Artificial Sequence
  Guide RNA
acaaaacaaauguugguuuccu

SEQ ID NO: 36743 - RNA, 22 nt, Artificial Sequence
  Guide RNA
acaaaguugagccaaaaagugu

SEQ ID NO: 36744 - RNA, 22 nt, Artificial Sequence
  Guide RNA
acaaauaauuccaguggccauu

SEQ ID NO: 36745 - RNA, 22 nt, Artificial Sequence
  Guide RNA
acaaauguugguuuccuuauug

SEQ ID NO: 36746 - RNA, 22 nt, Artificial Sequence
  Guide RNA
acaacaaauaauuccaguggcc

SEQ ID NO: 36747 - RNA, 22 nt, Artificial Sequence
  Guide RNA
acaaguuacggaauacugacac

SEQ ID NO: 36748 - RNA, 22 nt, Artificial Sequence
  Guide RNA
acaccgauuauuuuccaacuua

SEQ ID NO: 36749 - RNA, 22 nt, Artificial Sequence
  Guide RNA
acaccuuaaaaguacugguuga

SEQ ID NO: 36750 - RNA, 22 nt, Artificial Sequence
  Guide RNA
acacugucaugcacaaucucuu

SEQ ID NO: 36751 - RNA, 22 nt, Artificial Sequence
  Guide RNA
acacuuuuuggcucaacuuugu

SEQ ID NO: 36752 - RNA, 22 nt, Artificial Sequence
  Guide RNA
acagaagaagaaguuuacaccu

SEQ ID NO: 36753 - RNA, 22 nt, Artificial Sequence
  Guide RNA
acagacaaaacaaauguugguu

SEQ ID NO: 36754 - RNA, 22 nt, Artificial Sequence
  Guide RNA
acaggggacccuucacuuucua

SEQ ID NO: 36755 - RNA, 22 nt, Artificial Sequence
  Guide RNA
acaguguucauggugacuaucu

SEQ ID NO: 36756 - RNA, 22 nt, Artificial Sequence
  Guide RNA
acauaaacugcugcuaaaagca

SEQ ID NO: 36757 - RNA, 22 nt, Artificial Sequence
  Guide RNA
acauagaaagugaagggucccc

SEQ ID NO: 36758 - RNA, 22 nt, Artificial Sequence
  Guide RNA
acauggccccaagucacuuaau

SEQ ID NO: 36759 - RNA, 22 nt, Artificial Sequence
  Guide RNA
acauugcuuuuagcagcaguuu

SEQ ID NO: 36760 - RNA, 22 nt, Artificial Sequence
  Guide RNA
accaacauuuguuuugucuguu

SEQ ID NO: 36761 - RNA, 22 nt, Artificial Sequence
  Guide RNA
accacauaaacugcugcuaaaa

SEQ ID NO: 36762 - RNA, 22 nt, Artificial Sequence
  Guide RNA
accaguacuuuuaagguguaaa

SEQ ID NO: 36763 - RNA, 22 nt, Artificial Sequence
  Guide RNA
accaugaacacugucaugcaca

SEQ ID NO: 36764 - RNA, 22 nt, Artificial Sequence
  Guide RNA
acccuucacuuucuaugucaaa

SEQ ID NO: 36765 - RNA, 22 nt, Artificial Sequence
  Guide RNA
accgauuauuuuccaacuuagg

SEQ ID NO: 36766 - RNA, 22 nt, Artificial Sequence
  Guide RNA
accuuaaaaguacugguugauu

SEQ ID NO: 36767 - RNA, 22 nt, Artificial Sequence
  Guide RNA
acggaauacugacaccgauuau

SEQ ID NO: 36768 - RNA, 22 nt, Artificial Sequence
  Guide RNA
acguccugaaaguauuugacau

SEQ ID NO: 36769 - RNA, 22 nt, Artificial Sequence
  Guide RNA
acuagacagaagaagaaguuua

SEQ ID NO: 36770 - RNA, 22 nt, Artificial Sequence
  Guide RNA
acuaucucugaagggggaaaag

SEQ ID NO: 36771 - RNA, 22 nt, Artificial Sequence
  Guide RNA
acucaacaaaguugagccaaaa

SEQ ID NO: 36772 - RNA, 22 nt, Artificial Sequence
  Guide RNA
acucuaagagauugugcaugac

SEQ ID NO: 36773 - RNA, 22 nt, Artificial Sequence
  Guide RNA
acugacaccgauuauuuuccaa

SEQ ID NO: 36774 - RNA, 22 nt, Artificial Sequence
  Guide RNA
acugacauugcuuuuagcagca

SEQ ID NO: 36775 - RNA, 22 nt, Artificial Sequence
  Guide RNA
acugauagguguucuacuuuaa

SEQ ID NO: 36776 - RNA, 22 nt, Artificial Sequence
  Guide RNA
acugcugcuaaaagcaauguca

SEQ ID NO: 36777 - RNA, 22 nt, Artificial Sequence
  Guide RNA
acuggaagaugaauuccaucaa

SEQ ID NO: 36778 - RNA, 22 nt, Artificial Sequence
  Guide RNA
acugguugauuaagugacuugg

SEQ ID NO: 36779 - RNA, 22 nt, Artificial Sequence
  Guide RNA
acugucaugcacaaucucuuag

SEQ ID NO: 36780 - RNA, 22 nt, Artificial Sequence
  Guide RNA
acuuaacuuuguugagacacuu

SEQ ID NO: 36781 - RNA, 22 nt, Artificial Sequence
  Guide RNA
acuuaggauccagacuauagaa

SEQ ID NO: 36782 - RNA, 22 nt, Artificial Sequence
  Guide RNA
acuucuucuucugucuagugaa

SEQ ID NO: 36783 - RNA, 22 nt, Artificial Sequence
  Guide RNA
acuucuuucuauagucuggauc

SEQ ID NO: 36784 - RNA, 22 nt, Artificial Sequence
  Guide RNA
acuuggggccauguuuacugga

SEQ ID NO: 36785 - RNA, 22 nt, Artificial Sequence
  Guide RNA
acuuguccaaagcauuuaggaa

SEQ ID NO: 36786 - RNA, 22 nt, Artificial Sequence
  Guide RNA
acuuuguugagacacuuuuugg

SEQ ID NO: 36787 - RNA, 22 nt, Artificial Sequence
  Guide RNA
acuuuucccccuucagagauag

SEQ ID NO: 36788 - RNA, 22 nt, Artificial Sequence
  Guide RNA
acuuuuuggcucaacuuuguug

SEQ ID NO: 36789 - RNA, 22 nt, Artificial Sequence
  Guide RNA
agaaagugaaggguccccuguu

SEQ ID NO: 36790 - RNA, 22 nt, Artificial Sequence
  Guide RNA
agaaauaccacauaaacugcug

SEQ ID NO: 36791 - RNA, 22 nt, Artificial Sequence
  Guide RNA
agaagaagaaguuuacaccuua

SEQ ID NO: 36792 - RNA, 22 nt, Artificial Sequence
  Guide RNA
agaagguaguaaaauuaagggg

SEQ ID NO: 36793 - RNA, 22 nt, Artificial Sequence
  Guide RNA
agacaaaacaaauguugguuuc

SEQ ID NO: 36794 - RNA, 22 nt, Artificial Sequence
  Guide RNA
agacacuuuuuggcucaacuuu

SEQ ID NO: 36795 - RNA, 22 nt, Artificial Sequence
  Guide RNA
agacagaagaagaaguuuacac

SEQ ID NO: 36796 - RNA, 22 nt, Artificial Sequence
  Guide RNA
agagaaauaccacauaaacugc

SEQ ID NO: 36797 - RNA, 22 nt, Artificial Sequence
  Guide RNA
agagauagucaccaugaacacu

SEQ ID NO: 36798 - RNA, 22 nt, Artificial Sequence
  Guide RNA
agagauugugcaugacaguguu

SEQ ID NO: 36799 - RNA, 22 nt, Artificial Sequence
  Guide RNA
agauagucaccaugaacacugu

SEQ ID NO: 36800 - RNA, 22 nt, Artificial Sequence
  Guide RNA
agauauuccuaaaugcuuugga

SEQ ID NO: 36801 - RNA, 22 nt, Artificial Sequence
  Guide RNA
agaugaauuccaucaauggcca

SEQ ID NO: 36802 - RNA, 22 nt, Artificial Sequence
  Guide RNA
agauugugcaugacaguguuca

SEQ ID NO: 36803 - RNA, 22 nt, Artificial Sequence
  Guide RNA
agcaaugucaguuucaaaagaa

SEQ ID NO: 36804 - RNA, 22 nt, Artificial Sequence
  Guide RNA
agcacuuuuauacaguuuugcc

SEQ ID NO: 36805 - RNA, 22 nt, Artificial Sequence
  Guide RNA
agcagcaguuuaugugguauuu

SEQ ID NO: 36806 - RNA, 22 nt, Artificial Sequence
  Guide RNA
agcaguuuaugugguauuucuc

SEQ ID NO: 36807 - RNA, 22 nt, Artificial Sequence
  Guide RNA
agccaaaaagugucucaacaaa

SEQ ID NO: 36808 - RNA, 22 nt, Artificial Sequence
  Guide RNA
aggaaaauucacuagacagaag

SEQ ID NO: 36809 - RNA, 22 nt, Artificial Sequence
  Guide RNA
aggaaaccaacauuuguuuugu

SEQ ID NO: 36810 - RNA, 22 nt, Artificial Sequence
  Guide RNA
aggauccagacuauagaaagaa

SEQ ID NO: 36811 - RNA, 22 nt, Artificial Sequence
  Guide RNA
aggggacccuucacuuucuaug

SEQ ID NO: 36812 - RNA, 22 nt, Artificial Sequence
  Guide RNA
agggggaaaagucaacagggga

SEQ ID NO: 36813 - RNA, 22 nt, Artificial Sequence
  Guide RNA
aggguccccuguugacuuuucc

SEQ ID NO: 36814 - RNA, 22 nt, Artificial Sequence
  Guide RNA
agguaguaaaauuaaggggauu

SEQ ID NO: 36815 - RNA, 22 nt, Artificial Sequence
  Guide RNA
agguguaaacuucuucuucugu

SEQ ID NO: 36816 - RNA, 22 nt, Artificial Sequence
  Guide RNA
aguaaacauggccccaagucac

SEQ ID NO: 36817 - RNA, 22 nt, Artificial Sequence
  Guide RNA
aguacugguugauuaagugacu

SEQ ID NO: 36818 - RNA, 22 nt, Artificial Sequence
  Guide RNA
aguagaacaccuaucaguuaaa

SEQ ID NO: 36819 - RNA, 22 nt, Artificial Sequence
  Guide RNA
aguauuccguaacuuguccaaa

SEQ ID NO: 36820 - RNA, 22 nt, Artificial Sequence
  Guide RNA
agucaacaggggacccuucacu

SEQ ID NO: 36821 - RNA, 22 nt, Artificial Sequence
  Guide RNA
agucaccaugaacacugucaug

SEQ ID NO: 36822 - RNA, 22 nt, Artificial Sequence
  Guide RNA
agucacuuaaucaaccaguacu

SEQ ID NO: 36823 - RNA, 22 nt, Artificial Sequence
  Guide RNA
agucuggauccuaaguuggaaa

SEQ ID NO: 36824 - RNA, 22 nt, Artificial Sequence
  Guide RNA
agugaaggguccccuguugacu

SEQ ID NO: 36825 - RNA, 22 nt, Artificial Sequence
  Guide RNA
agugacuuggggccauguuuac

SEQ ID NO: 36826 - RNA, 22 nt, Artificial Sequence
  Guide RNA
aguggccauugauggaauucau

SEQ ID NO: 36827 - RNA, 22 nt, Artificial Sequence
  Guide RNA
agugucucaacaaaguuaagua

SEQ ID NO: 36828 - RNA, 22 nt, Artificial Sequence
  Guide RNA
aguguucauggugacuaucucu

SEQ ID NO: 36829 - RNA, 22 nt, Artificial Sequence
  Guide RNA
aguuacggaauacugacaccga

SEQ ID NO: 36830 - RNA, 22 nt, Artificial Sequence
  Guide RNA
aguugagccaaaaagugucuca

SEQ ID NO: 36831 - RNA, 22 nt, Artificial Sequence
  Guide RNA
aguuggaaaauaaucgguguca

SEQ ID NO: 36832 - RNA, 22 nt, Artificial Sequence
  Guide RNA
aguuuacaccuuaaaaguacug

SEQ ID NO: 36833 - RNA, 22 nt, Artificial Sequence
  Guide RNA
auaaacugcugcuaaaagcaau

SEQ ID NO: 36834 - RNA, 22 nt, Artificial Sequence
  Guide RNA
auaaucggugucaguauuccgu

SEQ ID NO: 36835 - RNA, 22 nt, Artificial Sequence
  Guide RNA
auaauuccaguggccauugaug

SEQ ID NO: 36836 - RNA, 22 nt, Artificial Sequence
  Guide RNA
auaccacauaaacugcugcuaa

SEQ ID NO: 36837 - RNA, 22 nt, Artificial Sequence
  Guide RNA
auacugacaccgauuauuuucc

SEQ ID NO: 36838 - RNA, 22 nt, Artificial Sequence
  Guide RNA
auacuuaacuuuguugagacac

SEQ ID NO: 36839 - RNA, 22 nt, Artificial Sequence
  Guide RNA
auagaaagugaaggguccccug

SEQ ID NO: 36840 - RNA, 22 nt, Artificial Sequence
  Guide RNA
auagucaccaugaacacuguca

SEQ ID NO: 36841 - RNA, 22 nt, Artificial Sequence
  Guide RNA
auagucuggauccuaaguugga

SEQ ID NO: 36842 - RNA, 22 nt, Artificial Sequence
  Guide RNA
auauuccuaaaugcuuuggaca

SEQ ID NO: 36843 - RNA, 22 nt, Artificial Sequence
  Guide RNA
aucaaccaguacuuuuaaggug

SEQ ID NO: 36844 - RNA, 22 nt, Artificial Sequence
  Guide RNA
aucaauggccacuggaauuauu

SEQ ID NO: 36845 - RNA, 22 nt, Artificial Sequence
  Guide RNA
auccagacuauagaaagaagua

SEQ ID NO: 36846 - RNA, 22 nt, Artificial Sequence
  Guide RNA
auccccuuaauuuuacuaccuu

SEQ ID NO: 36847 - RNA, 22 nt, Artificial Sequence
  Guide RNA
auccuaaguuggaaaauaaucg

SEQ ID NO: 36848 - RNA, 22 nt, Artificial Sequence
  Guide RNA
aucggugucaguauuccguaac

SEQ ID NO: 36849 - RNA, 22 nt, Artificial Sequence
  Guide RNA
aucucugaagggggaaaaguca

SEQ ID NO: 36850 - RNA, 22 nt, Artificial Sequence
  Guide RNA
aucuuccaguaaacauggcccc

SEQ ID NO: 36851 - RNA, 22 nt, Artificial Sequence
  Guide RNA
augaacacugucaugcacaauc

SEQ ID NO: 36852 - RNA, 22 nt, Artificial Sequence
  Guide RNA
augaauuccaucaauggccacu

SEQ ID NO: 36853 - RNA, 22 nt, Artificial Sequence
  Guide RNA
augacaguguucauggugacua

SEQ ID NO: 36854 - RNA, 22 nt, Artificial Sequence
  Guide RNA
augacucaacaaaguugagcca

SEQ ID NO: 36855 - RNA, 22 nt, Artificial Sequence
  Guide RNA
augcacaaucucuuagaguuua

SEQ ID NO: 36856 - RNA, 22 nt, Artificial Sequence
  Guide RNA
augcuuuggacaaguuacggaa

SEQ ID NO: 36857 - RNA, 22 nt, Artificial Sequence
  Guide RNA
auggaauucaucuuccaguaaa

SEQ ID NO: 36858 - RNA, 22 nt, Artificial Sequence
  Guide RNA
auggccacuggaauuauuuguu

SEQ ID NO: 36859 - RNA, 22 nt, Artificial Sequence
  Guide RNA
auggccccaagucacuuaauca

SEQ ID NO: 36860 - RNA, 22 nt, Artificial Sequence
  Guide RNA
auggugacuaucucugaagggg

SEQ ID NO: 36861 - RNA, 22 nt, Artificial Sequence
  Guide RNA
augucaaauacuuucaggacgu

SEQ ID NO: 36862 - RNA, 22 nt, Artificial Sequence
  Guide RNA
augugguauuucucuuaugugc

SEQ ID NO: 36863 - RNA, 22 nt, Artificial Sequence
  Guide RNA
auguuuacuggaagaugaauuc

SEQ ID NO: 36864 - RNA, 22 nt, Artificial Sequence
  Guide RNA
auuaagugacuuggggccaugu

SEQ ID NO: 36865 - RNA, 22 nt, Artificial Sequence
  Guide RNA
auuacuucuuucuauagucugg

SEQ ID NO: 36866 - RNA, 22 nt, Artificial Sequence
  Guide RNA
auuauuuuccaacuuaggaucc

SEQ ID NO: 36867 - RNA, 22 nt, Artificial Sequence
  Guide RNA
auucacuagacagaagaagaag

SEQ ID NO: 36868 - RNA, 22 nt, Artificial Sequence
  Guide RNA
auucaucuuccaguaaacaugg

SEQ ID NO: 36869 - RNA, 22 nt, Artificial Sequence
  Guide RNA
auuccaguggccauugauggaa

SEQ ID NO: 36870 - RNA, 22 nt, Artificial Sequence
  Guide RNA
auuccaucaauggccacuggaa

SEQ ID NO: 36871 - RNA, 22 nt, Artificial Sequence
  Guide RNA
auuccguaacuuguccaaagca

SEQ ID NO: 36872 - RNA, 22 nt, Artificial Sequence
  Guide RNA
auuccuaaaugcuuuggacaag

SEQ ID NO: 36873 - RNA, 22 nt, Artificial Sequence
  Guide RNA
auugauggaauucaucuuccag

SEQ ID NO: 36874 - RNA, 22 nt, Artificial Sequence
  Guide RNA
auugcacauaagagaaauacca

SEQ ID NO: 36875 - RNA, 22 nt, Artificial Sequence
  Guide RNA
auugcuuuuagcagcaguuuau

SEQ ID NO: 36876 - RNA, 22 nt, Artificial Sequence
  Guide RNA
auugugcaugacaguguucaug

SEQ ID NO: 36877 - RNA, 22 nt, Artificial Sequence
  Guide RNA
auuucucuuaugugcaauuagc

SEQ ID NO: 36878 - RNA, 22 nt, Artificial Sequence
  Guide RNA
auuugacauagaaagugaaggg

SEQ ID NO: 36879 - RNA, 22 nt, Artificial Sequence
  Guide RNA
auuuuccaacuuaggauccaga

SEQ ID NO: 36880 - RNA, 22 nt, Artificial Sequence
  Guide RNA
caaaaagugucucaacaaaguu

SEQ ID NO: 36881 - RNA, 22 nt, Artificial Sequence
  Guide RNA
caaaacaaauguugguuuccuu

SEQ ID NO: 36882 - RNA, 22 nt, Artificial Sequence
  Guide RNA
caaaguugagccaaaaaguguc

SEQ ID NO: 36883 - RNA, 22 nt, Artificial Sequence
  Guide RNA
caaauaauuccaguggccauug

SEQ ID NO: 36884 - RNA, 22 nt, Artificial Sequence
  Guide RNA
caaauacuuucaggacguuuuu

SEQ ID NO: 36885 - RNA, 22 nt, Artificial Sequence
  Guide RNA
caaauguugguuuccuuauuga

SEQ ID NO: 36886 - RNA, 22 nt, Artificial Sequence
  Guide RNA
caacaaaguugagccaaaaagu

SEQ ID NO: 36887 - RNA, 22 nt, Artificial Sequence
  Guide RNA
caacaaauaauuccaguggcca

SEQ ID NO: 36888 - RNA, 22 nt, Artificial Sequence
  Guide RNA
caacaggggacccuucacuuuc

SEQ ID NO: 36889 - RNA, 22 nt, Artificial Sequence
  Guide RNA
caaccaguacuuuuaaggugua

SEQ ID NO: 36890 - RNA, 22 nt, Artificial Sequence
  Guide RNA
caacuuaggauccagacuauag

SEQ ID NO: 36891 - RNA, 22 nt, Artificial Sequence
  Guide RNA
caagucacuuaaucaaccagua

SEQ ID NO: 36892 - RNA, 22 nt, Artificial Sequence
  Guide RNA
caaguuacggaauacugacacc

SEQ ID NO: 36893 - RNA, 22 nt, Artificial Sequence
  Guide RNA
caauaaggaaaccaacauuugu

SEQ ID NO: 36894 - RNA, 22 nt, Artificial Sequence
  Guide RNA
caauggccacuggaauuauuug

SEQ ID NO: 36895 - RNA, 22 nt, Artificial Sequence
  Guide RNA
caaugucaguuucaaaagaaga

SEQ ID NO: 36896 - RNA, 22 nt, Artificial Sequence
  Guide RNA
cacaaucucuuagaguuuagaa

SEQ ID NO: 36897 - RNA, 22 nt, Artificial Sequence
  Guide RNA
cacauaaacugcugcuaaaagc

SEQ ID NO: 36898 - RNA, 22 nt, Artificial Sequence
  Guide RNA
cacauaagagaaauaccacaua

SEQ ID NO: 36899 - RNA, 22 nt, Artificial Sequence
  Guide RNA
caccaugaacacugucaugcac

SEQ ID NO: 36900 - RNA, 22 nt, Artificial Sequence
  Guide RNA
caccgauuauuuuccaacuuag

SEQ ID NO: 36901 - RNA, 22 nt, Artificial Sequence
  Guide RNA
caccuuaaaaguacugguugau

SEQ ID NO: 36902 - RNA, 22 nt, Artificial Sequence
  Guide RNA
cacuagacagaagaagaaguuu

SEQ ID NO: 36903 - RNA, 22 nt, Artificial Sequence
  Guide RNA
cacuggaauuauuuguuguaga

SEQ ID NO: 36904 - RNA, 22 nt, Artificial Sequence
  Guide RNA
cacugucaugcacaaucucuua

SEQ ID NO: 36905 - RNA, 22 nt, Artificial Sequence
  Guide RNA
cacuuaaucaaccaguacuuuu

SEQ ID NO: 36906 - RNA, 22 nt, Artificial Sequence
  Guide RNA
cacuuuuauacaguuuugccaa

SEQ ID NO: 36907 - RNA, 22 nt, Artificial Sequence
  Guide RNA
cacuuuuuggcucaacuuuguu

SEQ ID NO: 36908 - RNA, 22 nt, Artificial Sequence
  Guide RNA
cagaagaagaaguuuacaccuu

SEQ ID NO: 36909 - RNA, 22 nt, Artificial Sequence
  Guide RNA
cagacaaaacaaauguugguuu

SEQ ID NO: 36910 - RNA, 22 nt, Artificial Sequence
  Guide RNA
cagagauagucaccaugaacac

SEQ ID NO: 36911 - RNA, 22 nt, Artificial Sequence
  Guide RNA
cagcaguuuaugugguauuucu

SEQ ID NO: 36912 - RNA, 22 nt, Artificial Sequence
  Guide RNA
caggggacccuucacuuucuau

SEQ ID NO: 36913 - RNA, 22 nt, Artificial Sequence
  Guide RNA
caguaaacauggccccaaguca

SEQ ID NO: 36914 - RNA, 22 nt, Artificial Sequence
  Guide RNA
caguacuuuuaagguguaaacu

SEQ ID NO: 36915 - RNA, 22 nt, Artificial Sequence
  Guide RNA
caguauuccguaacuuguccaa

SEQ ID NO: 36916 - RNA, 22 nt, Artificial Sequence
  Guide RNA
caguggccauugauggaauuca

SEQ ID NO: 36917 - RNA, 22 nt, Artificial Sequence
  Guide RNA
caguguucauggugacuaucuc

SEQ ID NO: 36918 - RNA, 22 nt, Artificial Sequence
  Guide RNA
caguuuaugugguauuucucuu

SEQ ID NO: 36919 - RNA, 22 nt, Artificial Sequence
  Guide RNA
cauaaacugcugcuaaaagcaa

SEQ ID NO: 36920 - RNA, 22 nt, Artificial Sequence
  Guide RNA
cauagaaagugaaggguccccu

SEQ ID NO: 36921 - RNA, 22 nt, Artificial Sequence
  Guide RNA
caucaauggccacuggaauuau

SEQ ID NO: 36922 - RNA, 22 nt, Artificial Sequence
  Guide RNA
caucuuccaguaaacauggccc

SEQ ID NO: 36923 - RNA, 22 nt, Artificial Sequence
  Guide RNA
caugaacacugucaugcacaau

SEQ ID NO: 36924 - RNA, 22 nt, Artificial Sequence
  Guide RNA
caugacaguguucauggugacu

SEQ ID NO: 36925 - RNA, 22 nt, Artificial Sequence
  Guide RNA
caugcacaaucucuuagaguuu

SEQ ID NO: 36926 - RNA, 22 nt, Artificial Sequence
  Guide RNA
cauggccccaagucacuuaauc

SEQ ID NO: 36927 - RNA, 22 nt, Artificial Sequence
  Guide RNA
cauggugacuaucucugaaggg

SEQ ID NO: 36928 - RNA, 22 nt, Artificial Sequence
  Guide RNA
cauguuuacuggaagaugaauu

SEQ ID NO: 36929 - RNA, 22 nt, Artificial Sequence
  Guide RNA
cauugauggaauucaucuucca

SEQ ID NO: 36930 - RNA, 22 nt, Artificial Sequence
  Guide RNA
cauugcuuuuagcagcaguuua

SEQ ID NO: 36931 - RNA, 22 nt, Artificial Sequence
  Guide RNA
ccaaaaagugucucaacaaagu

SEQ ID NO: 36932 - RNA, 22 nt, Artificial Sequence
  Guide RNA
ccaaagcauuuaggaauaucua

SEQ ID NO: 36933 - RNA, 22 nt, Artificial Sequence
  Guide RNA
ccaacauuuguuuugucuguuu

SEQ ID NO: 36934 - RNA, 22 nt, Artificial Sequence
  Guide RNA
ccaacuuaggauccagacuaua

SEQ ID NO: 36935 - RNA, 22 nt, Artificial Sequence
  Guide RNA
ccaagucacuuaaucaaccagu

SEQ ID NO: 36936 - RNA, 22 nt, Artificial Sequence
  Guide RNA
ccacauaaacugcugcuaaaag

SEQ ID NO: 36937 - RNA, 22 nt, Artificial Sequence
  Guide RNA
ccacuggaauuauuuguuguag

SEQ ID NO: 36938 - RNA, 22 nt, Artificial Sequence
  Guide RNA
ccagacuauagaaagaaguaau

SEQ ID NO: 36939 - RNA, 22 nt, Artificial Sequence
  Guide RNA
ccaguaaacauggccccaaguc

SEQ ID NO: 36940 - RNA, 22 nt, Artificial Sequence
  Guide RNA
ccaguacuuuuaagguguaaac

SEQ ID NO: 36941 - RNA, 22 nt, Artificial Sequence
  Guide RNA
ccaguggccauugauggaauuc

SEQ ID NO: 36942 - RNA, 22 nt, Artificial Sequence
  Guide RNA
ccaucaauggccacuggaauua

SEQ ID NO: 36943 - RNA, 22 nt, Artificial Sequence
  Guide RNA
ccaugaacacugucaugcacaa

SEQ ID NO: 36944 - RNA, 22 nt, Artificial Sequence
  Guide RNA
ccauguuuacuggaagaugaau

SEQ ID NO: 36945 - RNA, 22 nt, Artificial Sequence
  Guide RNA
ccauugauggaauucaucuucc

SEQ ID NO: 36946 - RNA, 22 nt, Artificial Sequence
  Guide RNA
cccaagucacuuaaucaaccag

SEQ ID NO: 36947 - RNA, 22 nt, Artificial Sequence
  Guide RNA
ccccaagucacuuaaucaacca

SEQ ID NO: 36948 - RNA, 22 nt, Artificial Sequence
  Guide RNA
cccccuucagagauagucacca

SEQ ID NO: 36949 - RNA, 22 nt, Artificial Sequence
  Guide RNA
ccccuguugacuuuucccccuu

SEQ ID NO: 36950 - RNA, 22 nt, Artificial Sequence
  Guide RNA
ccccuuaauuuuacuaccuucu

SEQ ID NO: 36951 - RNA, 22 nt, Artificial Sequence
  Guide RNA
ccccuucagagauagucaccau

SEQ ID NO: 36952 - RNA, 22 nt, Artificial Sequence
  Guide RNA
cccuguugacuuuucccccuuc

SEQ ID NO: 36953 - RNA, 22 nt, Artificial Sequence
  Guide RNA
cccuuaauuuuacuaccuucuu

SEQ ID NO: 36954 - RNA, 22 nt, Artificial Sequence
  Guide RNA
cccuucacuuucuaugucaaau

SEQ ID NO: 36955 - RNA, 22 nt, Artificial Sequence
  Guide RNA
cccuucagagauagucaccaug

SEQ ID NO: 36956 - RNA, 22 nt, Artificial Sequence
  Guide RNA
ccgauuauuuuccaacuuagga

SEQ ID NO: 36957 - RNA, 22 nt, Artificial Sequence
  Guide RNA
ccguaacuuguccaaagcauuu

SEQ ID NO: 36958 - RNA, 22 nt, Artificial Sequence
  Guide RNA
ccuaaaugcuuuggacaaguua

SEQ ID NO: 36959 - RNA, 22 nt, Artificial Sequence
  Guide RNA
ccuaaguuggaaaauaaucggu

SEQ ID NO: 36960 - RNA, 22 nt, Artificial Sequence
  Guide RNA
ccuaggagauuuaacauuuaca

SEQ ID NO: 36961 - RNA, 22 nt, Artificial Sequence
  Guide RNA
ccugaaaguauuugacauagaa

SEQ ID NO: 36962 - RNA, 22 nt, Artificial Sequence
  Guide RNA
ccuguugacuuuucccccuuca

SEQ ID NO: 36963 - RNA, 22 nt, Artificial Sequence
  Guide RNA
ccuuaaaaguacugguugauua

SEQ ID NO: 36964 - RNA, 22 nt, Artificial Sequence
  Guide RNA
ccuuaauuuuacuaccuucuuc

SEQ ID NO: 36965 - RNA, 22 nt, Artificial Sequence
  Guide RNA
ccuucacuuucuaugucaaaua

SEQ ID NO: 36966 - RNA, 22 nt, Artificial Sequence
  Guide RNA
ccuucagagauagucaccauga

SEQ ID NO: 36967 - RNA, 22 nt, Artificial Sequence
  Guide RNA
cgauuauuuuccaacuuaggau

SEQ ID NO: 36968 - RNA, 22 nt, Artificial Sequence
  Guide RNA
cggaauacugacaccgauuauu

SEQ ID NO: 36969 - RNA, 22 nt, Artificial Sequence
  Guide RNA
cggugucaguauuccguaacuu

SEQ ID NO: 36970 - RNA, 22 nt, Artificial Sequence
  Guide RNA
cguaacuuguccaaagcauuua

SEQ ID NO: 36971 - RNA, 22 nt, Artificial Sequence
  Guide RNA
cguccugaaaguauuugacaua

SEQ ID NO: 36972 - RNA, 22 nt, Artificial Sequence
  Guide RNA
cuaaaagcaaugucaguuucaa

SEQ ID NO: 36973 - RNA, 22 nt, Artificial Sequence
  Guide RNA
cuaaacucuaagagauugugca

SEQ ID NO: 36974 - RNA, 22 nt, Artificial Sequence
  Guide RNA
cuaaaugcuuuggacaaguuac

SEQ ID NO: 36975 - RNA, 22 nt, Artificial Sequence
  Guide RNA
cuaagagauugugcaugacagu

SEQ ID NO: 36976 - RNA, 22 nt, Artificial Sequence
  Guide RNA
cuaaguuggaaaauaaucggug

SEQ ID NO: 36977 - RNA, 22 nt, Artificial Sequence
  Guide RNA
cuacaacaaauaauuccagugg

SEQ ID NO: 36978 - RNA, 22 nt, Artificial Sequence
  Guide RNA
cuagacagaagaagaaguuuac

SEQ ID NO: 36979 - RNA, 22 nt, Artificial Sequence
  Guide RNA
cuaggagauuuaacauuuacac

SEQ ID NO: 36980 - RNA, 22 nt, Artificial Sequence
  Guide RNA
cuauagucuggauccuaaguug

SEQ ID NO: 36981 - RNA, 22 nt, Artificial Sequence
  Guide RNA
cuaucucugaagggggaaaagu

SEQ ID NO: 36982 - RNA, 22 nt, Artificial Sequence
  Guide RNA
cuaugucaaauacuuucaggac

SEQ ID NO: 36983 - RNA, 22 nt, Artificial Sequence
  Guide RNA
cucaacaaaguugagccaaaaa

SEQ ID NO: 36984 - RNA, 22 nt, Artificial Sequence
  Guide RNA
cucaacuuuguugagucauuuu

SEQ ID NO: 36985 - RNA, 22 nt, Artificial Sequence
  Guide RNA
cucuaagagauugugcaugaca

SEQ ID NO: 36986 - RNA, 22 nt, Artificial Sequence
  Guide RNA
cucugaagggggaaaagucaac

SEQ ID NO: 36987 - RNA, 22 nt, Artificial Sequence
  Guide RNA
cucuuaugugcaauuagcacaa

SEQ ID NO: 36988 - RNA, 22 nt, Artificial Sequence
  Guide RNA
cugaagggggaaaagucaacag

SEQ ID NO: 36989 - RNA, 22 nt, Artificial Sequence
  Guide RNA
cugacaccgauuauuuuccaac

SEQ ID NO: 36990 - RNA, 22 nt, Artificial Sequence
  Guide RNA
cugacauugcuuuuagcagcag

SEQ ID NO: 36991 - RNA, 22 nt, Artificial Sequence
  Guide RNA
cugauagguguucuacuuuaaa

SEQ ID NO: 36992 - RNA, 22 nt, Artificial Sequence
  Guide RNA
cugcuaaaagcaaugucaguuu

SEQ ID NO: 36993 - RNA, 22 nt, Artificial Sequence
  Guide RNA
cugcugcuaaaagcaaugucag

SEQ ID NO: 36994 - RNA, 22 nt, Artificial Sequence
  Guide RNA
cuggaagaugaauuccaucaau

SEQ ID NO: 36995 - RNA, 22 nt, Artificial Sequence
  Guide RNA
cuggauccuaaguuggaaaaua

SEQ ID NO: 36996 - RNA, 22 nt, Artificial Sequence
  Guide RNA
cugguugauuaagugacuuggg

SEQ ID NO: 36997 - RNA, 22 nt, Artificial Sequence
  Guide RNA
cuguauaaaagugcuuaaugac

SEQ ID NO: 36998 - RNA, 22 nt, Artificial Sequence
  Guide RNA
cugucaugcacaaucucuuaga

SEQ ID NO: 36999 - RNA, 22 nt, Artificial Sequence
  Guide RNA
cuguugacuuuucccccuucag

SEQ ID NO: 37000 - RNA, 22 nt, Artificial Sequence
  Guide RNA
cuuaacuuuguugagacacuuu

SEQ ID NO: 37001 - RNA, 22 nt, Artificial Sequence
  Guide RNA
cuuaggauccagacuauagaaa

SEQ ID NO: 37002 - RNA, 22 nt, Artificial Sequence
  Guide RNA
cuuaugugcaauuagcacaaaa

SEQ ID NO: 37003 - RNA, 22 nt, Artificial Sequence
  Guide RNA
cuucacuuucuaugucaaauac

SEQ ID NO: 37004 - RNA, 22 nt, Artificial Sequence
  Guide RNA
cuucagagauagucaccaugaa

SEQ ID NO: 37005 - RNA, 22 nt, Artificial Sequence
  Guide RNA
cuuccaguaaacauggccccaa

SEQ ID NO: 37006 - RNA, 22 nt, Artificial Sequence
  Guide RNA
cuucuucugucuagugaauuuu

SEQ ID NO: 37007 - RNA, 22 nt, Artificial Sequence
  Guide RNA
cuucuucuucugucuagugaau

SEQ ID NO: 37008 - RNA, 22 nt, Artificial Sequence
  Guide RNA
cuucuuucuauagucuggaucc

SEQ ID NO: 37009 - RNA, 22 nt, Artificial Sequence
  Guide RNA
cuucuuuugaaacugacauugc

SEQ ID NO: 37010 - RNA, 22 nt, Artificial Sequence
  Guide RNA
cuuggggccauguuuacuggaa

SEQ ID NO: 37011 - RNA, 22 nt, Artificial Sequence
  Guide RNA
cuuguccaaagcauuuaggaau

SEQ ID NO: 37012 - RNA, 22 nt, Artificial Sequence
  Guide RNA
cuuucuauagucuggauccuaa

SEQ ID NO: 37013 - RNA, 22 nt, Artificial Sequence
  Guide RNA
cuuuggacaaguuacggaauac

SEQ ID NO: 37014 - RNA, 22 nt, Artificial Sequence
  Guide RNA
cuuuguugagacacuuuuuggc

SEQ ID NO: 37015 - RNA, 22 nt, Artificial Sequence
  Guide RNA
cuuuuaagguguaaacuucuuc

SEQ ID NO: 37016 - RNA, 22 nt, Artificial Sequence
  Guide RNA
cuuuuagcagcaguuuaugugg

SEQ ID NO: 37017 - RNA, 22 nt, Artificial Sequence
  Guide RNA
cuuuucccccuucagagauagu

SEQ ID NO: 37018 - RNA, 22 nt, Artificial Sequence
  Guide RNA
cuuuugaaacugacauugcuuu

SEQ ID NO: 37019 - RNA, 22 nt, Artificial Sequence
  Guide RNA
cuuuuuggcucaacuuuguuga

SEQ ID NO: 37020 - RNA, 22 nt, Artificial Sequence
  Guide RNA
gaaaagucaacaggggacccuu

SEQ ID NO: 37021 - RNA, 22 nt, Artificial Sequence
  Guide RNA
gaaaauaaucggugucaguauu

SEQ ID NO: 37022 - RNA, 22 nt, Artificial Sequence
  Guide RNA
gaaaauucacuagacagaagaa

SEQ ID NO: 37023 - RNA, 22 nt, Artificial Sequence
  Guide RNA
gaaaccaacauuuguuuugucu

SEQ ID NO: 37024 - RNA, 22 nt, Artificial Sequence
  Guide RNA
gaaacugacauugcuuuuagca

SEQ ID NO: 37025 - RNA, 22 nt, Artificial Sequence
  Guide RNA
gaaagugaaggguccccuguug

SEQ ID NO: 37026 - RNA, 22 nt, Artificial Sequence
  Guide RNA
gaaauaccacauaaacugcugc

SEQ ID NO: 37027 - RNA, 22 nt, Artificial Sequence
  Guide RNA
gaacacugucaugcacaaucuc

SEQ ID NO: 37028 - RNA, 22 nt, Artificial Sequence
  Guide RNA
gaagaagaaguuuacaccuuaa

SEQ ID NO: 37029 - RNA, 22 nt, Artificial Sequence
  Guide RNA
gaagaagguaguaaaauuaagg

SEQ ID NO: 37030 - RNA, 22 nt, Artificial Sequence
  Guide RNA
gaagaaguuuacaccuuaaaag

SEQ ID NO: 37031 - RNA, 22 nt, Artificial Sequence
  Guide RNA
gaagaugaauuccaucaauggc

SEQ ID NO: 37032 - RNA, 22 nt, Artificial Sequence
  Guide RNA
gaagggggaaaagucaacaggg

SEQ ID NO: 37033 - RNA, 22 nt, Artificial Sequence
  Guide RNA
gaaggguccccuguugacuuuu

SEQ ID NO: 37034 - RNA, 22 nt, Artificial Sequence
  Guide RNA
gaagguaguaaaauuaagggga

SEQ ID NO: 37035 - RNA, 22 nt, Artificial Sequence
  Guide RNA
gaaguuuacaccuuaaaaguac

SEQ ID NO: 37036 - RNA, 22 nt, Artificial Sequence
  Guide RNA
gaauacugacaccgauuauuuu

SEQ ID NO: 37037 - RNA, 22 nt, Artificial Sequence
  Guide RNA
gaauucaucuuccaguaaacau

SEQ ID NO: 37038 - RNA, 22 nt, Artificial Sequence
  Guide RNA
gaauuccaucaauggccacugg

SEQ ID NO: 37039 - RNA, 22 nt, Artificial Sequence
  Guide RNA
gaauuuuuugugcuaauugcac

SEQ ID NO: 37040 - RNA, 22 nt, Artificial Sequence
  Guide RNA
gacaaaacaaauguugguuucc

SEQ ID NO: 37041 - RNA, 22 nt, Artificial Sequence
  Guide RNA
gacaaguuacggaauacugaca

SEQ ID NO: 37042 - RNA, 22 nt, Artificial Sequence
  Guide RNA
gacaccgauuauuuuccaacuu

SEQ ID NO: 37043 - RNA, 22 nt, Artificial Sequence
  Guide RNA
gacacuuuuuggcucaacuuug

SEQ ID NO: 37044 - RNA, 22 nt, Artificial Sequence
  Guide RNA
gacagaagaagaaguuuacacc

SEQ ID NO: 37045 - RNA, 22 nt, Artificial Sequence
  Guide RNA
gacaguguucauggugacuauc

SEQ ID NO: 37046 - RNA, 22 nt, Artificial Sequence
  Guide RNA
gacauagaaagugaaggguccc

SEQ ID NO: 37047 - RNA, 22 nt, Artificial Sequence
  Guide RNA
gacauugcuuuuagcagcaguu

SEQ ID NO: 37048 - RNA, 22 nt, Artificial Sequence
  Guide RNA
gacccuucacuuucuaugucaa

SEQ ID NO: 37049 - RNA, 22 nt, Artificial Sequence
  Guide RNA
gacuaucucugaagggggaaaa

SEQ ID NO: 37050 - RNA, 22 nt, Artificial Sequence
  Guide RNA
gacucaacaaaguugagccaaa

SEQ ID NO: 37051 - RNA, 22 nt, Artificial Sequence
  Guide RNA
gacuuggggccauguuuacugg

SEQ ID NO: 37052 - RNA, 22 nt, Artificial Sequence
  Guide RNA
gacuuuucccccuucagagaua

SEQ ID NO: 37053 - RNA, 22 nt, Artificial Sequence
  Guide RNA
gagaaauaccacauaaacugcu

SEQ ID NO: 37054 - RNA, 22 nt, Artificial Sequence
  Guide RNA
gagacacuuuuuggcucaacuu

SEQ ID NO: 37055 - RNA, 22 nt, Artificial Sequence
  Guide RNA
gagauagucaccaugaacacug

SEQ ID NO: 37056 - RNA, 22 nt, Artificial Sequence
  Guide RNA
gagauugugcaugacaguguuc

SEQ ID NO: 37057 - RNA, 22 nt, Artificial Sequence
  Guide RNA
gagccaaaaagugucucaacaa

SEQ ID NO: 37058 - RNA, 22 nt, Artificial Sequence
  Guide RNA
gauagucaccaugaacacuguc

SEQ ID NO: 37059 - RNA, 22 nt, Artificial Sequence
  Guide RNA
gauauuccuaaaugcuuuggac

SEQ ID NO: 37060 - RNA, 22 nt, Artificial Sequence
  Guide RNA
gauccagacuauagaaagaagu

SEQ ID NO: 37061 - RNA, 22 nt, Artificial Sequence
  Guide RNA
gauccuaaguuggaaaauaauc

SEQ ID NO: 37062 - RNA, 22 nt, Artificial Sequence
  Guide RNA
gaugaauuccaucaauggccac

SEQ ID NO: 37063 - RNA, 22 nt, Artificial Sequence
  Guide RNA
gauggaauucaucuuccaguaa

SEQ ID NO: 37064 - RNA, 22 nt, Artificial Sequence
  Guide RNA
gauuaagugacuuggggccaug

SEQ ID NO: 37065 - RNA, 22 nt, Artificial Sequence
  Guide RNA
gauuauuuuccaacuuaggauc

SEQ ID NO: 37066 - RNA, 22 nt, Artificial Sequence
  Guide RNA
gauugugcaugacaguguucau

SEQ ID NO: 37067 - RNA, 22 nt, Artificial Sequence
  Guide RNA
gcaaaacuguauaaaagugcuu

SEQ ID NO: 37068 - RNA, 22 nt, Artificial Sequence
  Guide RNA
gcaaugucaguuucaaaagaag

SEQ ID NO: 37069 - RNA, 22 nt, Artificial Sequence
  Guide RNA
gcacaaucucuuagaguuuaga

SEQ ID NO: 37070 - RNA, 22 nt, Artificial Sequence
  Guide RNA
gcacauaagagaaauaccacau

SEQ ID NO: 37071 - RNA, 22 nt, Artificial Sequence
  Guide RNA
gcacuuuuauacaguuuugcca

SEQ ID NO: 37072 - RNA, 22 nt, Artificial Sequence
  Guide RNA
gcagcaguuuaugugguauuuc

SEQ ID NO: 37073 - RNA, 22 nt, Artificial Sequence
  Guide RNA
gcaguuuaugugguauuucucu

SEQ ID NO: 37074 - RNA, 22 nt, Artificial Sequence
  Guide RNA
gcaugacaguguucauggugac

SEQ ID NO: 37075 - RNA, 22 nt, Artificial Sequence
  Guide RNA
gccaaaaagugucucaacaaag

SEQ ID NO: 37076 - RNA, 22 nt, Artificial Sequence
  Guide RNA
gccacuggaauuauuuguugua

SEQ ID NO: 37077 - RNA, 22 nt, Artificial Sequence
  Guide RNA
gccauguuuacuggaagaugaa

SEQ ID NO: 37078 - RNA, 22 nt, Artificial Sequence
  Guide RNA
gccauugauggaauucaucuuc

SEQ ID NO: 37079 - RNA, 22 nt, Artificial Sequence
  Guide RNA
gccccaagucacuuaaucaacc

SEQ ID NO: 37080 - RNA, 22 nt, Artificial Sequence
  Guide RNA
gcuaaaagcaaugucaguuuca

SEQ ID NO: 37081 - RNA, 22 nt, Artificial Sequence
  Guide RNA
gcuaauugcacauaagagaaau

SEQ ID NO: 37082 - RNA, 22 nt, Artificial Sequence
  Guide RNA
gcuaauuuaaaaacguccugaa

SEQ ID NO: 37083 - RNA, 22 nt, Artificial Sequence
  Guide RNA
gcucaacuuuguugagucauuu

SEQ ID NO: 37084 - RNA, 22 nt, Artificial Sequence
  Guide RNA
gcugcuaaaagcaaugucaguu

SEQ ID NO: 37085 - RNA, 22 nt, Artificial Sequence
  Guide RNA
gcuuuggacaaguuacggaaua

SEQ ID NO: 37086 - RNA, 22 nt, Artificial Sequence
  Guide RNA
gcuuuuagcagcaguuuaugug

SEQ ID NO: 37087 - RNA, 22 nt, Artificial Sequence
  Guide RNA
ggaaaagucaacaggggacccu

SEQ ID NO: 37088 - RNA, 22 nt, Artificial Sequence
  Guide RNA
ggaaaauaaucggugucaguau

SEQ ID NO: 37089 - RNA, 22 nt, Artificial Sequence
  Guide RNA
ggaaaauucacuagacagaaga

SEQ ID NO: 37090 - RNA, 22 nt, Artificial Sequence
  Guide RNA
ggaaaccaacauuuguuuuguc

SEQ ID NO: 37091 - RNA, 22 nt, Artificial Sequence
  Guide RNA
ggaagaugaauuccaucaaugg

SEQ ID NO: 37092 - RNA, 22 nt, Artificial Sequence
  Guide RNA
ggaauacugacaccgauuauuu

SEQ ID NO: 37093 - RNA, 22 nt, Artificial Sequence
  Guide RNA
ggaauucaucuuccaguaaaca

SEQ ID NO: 37094 - RNA, 22 nt, Artificial Sequence
  Guide RNA
ggacaaguuacggaauacugac

SEQ ID NO: 37095 - RNA, 22 nt, Artificial Sequence
  Guide RNA
ggacccuucacuuucuauguca

SEQ ID NO: 37096 - RNA, 22 nt, Artificial Sequence
  Guide RNA
ggauccagacuauagaaagaag

SEQ ID NO: 37097 - RNA, 22 nt, Artificial Sequence
  Guide RNA
ggauccuaaguuggaaaauaau

SEQ ID NO: 37098 - RNA, 22 nt, Artificial Sequence
  Guide RNA
ggcaaaacuguauaaaagugcu

SEQ ID NO: 37099 - RNA, 22 nt, Artificial Sequence
  Guide RNA
ggccacuggaauuauuuguugu

SEQ ID NO: 37100 - RNA, 22 nt, Artificial Sequence
  Guide RNA
ggccauguuuacuggaagauga

SEQ ID NO: 37101 - RNA, 22 nt, Artificial Sequence
  Guide RNA
ggccauugauggaauucaucuu

SEQ ID NO: 37102 - RNA, 22 nt, Artificial Sequence
  Guide RNA
ggccccaagucacuuaaucaac

SEQ ID NO: 37103 - RNA, 22 nt, Artificial Sequence
  Guide RNA
ggcucaacuuuguugagucauu

SEQ ID NO: 37104 - RNA, 22 nt, Artificial Sequence
  Guide RNA
gggaaaagucaacaggggaccc

SEQ ID NO: 37105 - RNA, 22 nt, Artificial Sequence
  Guide RNA
gggacccuucacuuucuauguc

SEQ ID NO: 37106 - RNA, 22 nt, Artificial Sequence
  Guide RNA
gggccauguuuacuggaagaug

SEQ ID NO: 37107 - RNA, 22 nt, Artificial Sequence
  Guide RNA
ggggaaaagucaacaggggacc

SEQ ID NO: 37108 - RNA, 22 nt, Artificial Sequence
  Guide RNA
ggggacccuucacuuucuaugu

SEQ ID NO: 37109 - RNA, 22 nt, Artificial Sequence
  Guide RNA
ggggccauguuuacuggaagau

SEQ ID NO: 37110 - RNA, 22 nt, Artificial Sequence
  Guide RNA
gggggaaaagucaacaggggac

SEQ ID NO: 37111 - RNA, 22 nt, Artificial Sequence
  Guide RNA
ggguccccuguugacuuuuccc

SEQ ID NO: 37112 - RNA, 22 nt, Artificial Sequence
  Guide RNA
gguaguaaaauuaaggggauuu

SEQ ID NO: 37113 - RNA, 22 nt, Artificial Sequence
  Guide RNA
gguauuucucuuaugugcaauu

SEQ ID NO: 37114 - RNA, 22 nt, Artificial Sequence
  Guide RNA
gguccccuguugacuuuucccc

SEQ ID NO: 37115 - RNA, 22 nt, Artificial Sequence
  Guide RNA
ggugacuaucucugaaggggga

SEQ ID NO: 37116 - RNA, 22 nt, Artificial Sequence
  Guide RNA
gguguaaacuucuucuucuguc

SEQ ID NO: 37117 - RNA, 22 nt, Artificial Sequence
  Guide RNA
ggugucaguauuccguaacuug

SEQ ID NO: 37118 - RNA, 22 nt, Artificial Sequence
  Guide RNA
gguugauuaagugacuuggggc

SEQ ID NO: 37119 - RNA, 22 nt, Artificial Sequence
  Guide RNA
guaaacauggccccaagucacu

SEQ ID NO: 37120 - RNA, 22 nt, Artificial Sequence
  Guide RNA
guaaacuucuucuucugucuag

SEQ ID NO: 37121 - RNA, 22 nt, Artificial Sequence
  Guide RNA
guaacuuguccaaagcauuuag

SEQ ID NO: 37122 - RNA, 22 nt, Artificial Sequence
  Guide RNA
guaaggaaaauucacuagacag

SEQ ID NO: 37123 - RNA, 22 nt, Artificial Sequence
  Guide RNA
guacugguugauuaagugacuu

SEQ ID NO: 37124 - RNA, 22 nt, Artificial Sequence
  Guide RNA
guacuuuuaagguguaaacuuc

SEQ ID NO: 37125 - RNA, 22 nt, Artificial Sequence
  Guide RNA
guagaacaccuaucaguuaaaa

SEQ ID NO: 37126 - RNA, 22 nt, Artificial Sequence
  Guide RNA
guauuccguaacuuguccaaag

SEQ ID NO: 37127 - RNA, 22 nt, Artificial Sequence
  Guide RNA
guauuugacauagaaagugaag

SEQ ID NO: 37128 - RNA, 22 nt, Artificial Sequence
  Guide RNA
gucaaauacuuucaggacguuu

SEQ ID NO: 37129 - RNA, 22 nt, Artificial Sequence
  Guide RNA
gucaacaggggacccuucacuu

SEQ ID NO: 37130 - RNA, 22 nt, Artificial Sequence
  Guide RNA
gucaccaugaacacugucaugc

SEQ ID NO: 37131 - RNA, 22 nt, Artificial Sequence
  Guide RNA
gucacuuaaucaaccaguacuu

SEQ ID NO: 37132 - RNA, 22 nt, Artificial Sequence
  Guide RNA
gucaguauuccguaacuugucc

SEQ ID NO: 37133 - RNA, 22 nt, Artificial Sequence
  Guide RNA
gucaugcacaaucucuuagagu

SEQ ID NO: 37134 - RNA, 22 nt, Artificial Sequence
  Guide RNA
gucauuaagcacuuuuauacag

SEQ ID NO: 37135 - RNA, 22 nt, Artificial Sequence
  Guide RNA
guccaaagcauuuaggaauauc

SEQ ID NO: 37136 - RNA, 22 nt, Artificial Sequence
  Guide RNA
guccccuguugacuuuuccccc

SEQ ID NO: 37137 - RNA, 22 nt, Artificial Sequence
  Guide RNA
guccugaaaguauuugacauag

SEQ ID NO: 37138 - RNA, 22 nt, Artificial Sequence
  Guide RNA
gucuauguaaaacagacaaaac

SEQ ID NO: 37139 - RNA, 22 nt, Artificial Sequence
  Guide RNA
gucuggauccuaaguuggaaaa

SEQ ID NO: 37140 - RNA, 22 nt, Artificial Sequence
  Guide RNA
gugaaggguccccuguugacuu

SEQ ID NO: 37141 - RNA, 22 nt, Artificial Sequence
  Guide RNA
gugacuaucucugaagggggaa

SEQ ID NO: 37142 - RNA, 22 nt, Artificial Sequence
  Guide RNA
gugacuuggggccauguuuacu

SEQ ID NO: 37143 - RNA, 22 nt, Artificial Sequence
  Guide RNA
gugcaauuagcacaaaaaauuc

SEQ ID NO: 37144 - RNA, 22 nt, Artificial Sequence
  Guide RNA
gugcaugacaguguucauggug

SEQ ID NO: 37145 - RNA, 22 nt, Artificial Sequence
  Guide RNA
gugcuaauugcacauaagagaa

SEQ ID NO: 37146 - RNA, 22 nt, Artificial Sequence
  Guide RNA
guggccauugauggaauucauc

SEQ ID NO: 37147 - RNA, 22 nt, Artificial Sequence
  Guide RNA
gugguauuucucuuaugugcaa

SEQ ID NO: 37148 - RNA, 22 nt, Artificial Sequence
  Guide RNA
guguaaacuucuucuucugucu

SEQ ID NO: 37149 - RNA, 22 nt, Artificial Sequence
  Guide RNA
gugucaguauuccguaacuugu

SEQ ID NO: 37150 - RNA, 22 nt, Artificial Sequence
  Guide RNA
gugucucaacaaaguuaaguau

SEQ ID NO: 37151 - RNA, 22 nt, Artificial Sequence
  Guide RNA
guguucauggugacuaucucug

SEQ ID NO: 37152 - RNA, 22 nt, Artificial Sequence
  Guide RNA
guuacggaauacugacaccgau

SEQ ID NO: 37153 - RNA, 22 nt, Artificial Sequence
  Guide RNA
guucauggugacuaucucugaa

SEQ ID NO: 37154 - RNA, 22 nt, Artificial Sequence
  Guide RNA
guugacuuuucccccuucagag

SEQ ID NO: 37155 - RNA, 22 nt, Artificial Sequence
  Guide RNA
guugagacacuuuuuggcucaa

SEQ ID NO: 37156 - RNA, 22 nt, Artificial Sequence
  Guide RNA
guugagccaaaaagugucucaa

SEQ ID NO: 37157 - RNA, 22 nt, Artificial Sequence
  Guide RNA
guugauuaagugacuuggggcc

SEQ ID NO: 37158 - RNA, 22 nt, Artificial Sequence
  Guide RNA
guuggaaaauaaucggugucag

SEQ ID NO: 37159 - RNA, 22 nt, Artificial Sequence
  Guide RNA
guuuacaccuuaaaaguacugg

SEQ ID NO: 37160 - RNA, 22 nt, Artificial Sequence
  Guide RNA
guuuacuggaagaugaauucca

SEQ ID NO: 37161 - RNA, 22 nt, Artificial Sequence
  Guide RNA
guuuugucuguuuuacauagac

SEQ ID NO: 37162 - RNA, 22 nt, Artificial Sequence
  Guide RNA
uaaacauggccccaagucacuu

SEQ ID NO: 37163 - RNA, 22 nt, Artificial Sequence
  Guide RNA
uaaacucuaagagauugugcau

SEQ ID NO: 37164 - RNA, 22 nt, Artificial Sequence
  Guide RNA
uaaacugcugcuaaaagcaaug

SEQ ID NO: 37165 - RNA, 22 nt, Artificial Sequence
  Guide RNA
uaaacuucuucuucugucuagu

SEQ ID NO: 37166 - RNA, 22 nt, Artificial Sequence
  Guide RNA
uaaaguagaacaccuaucaguu

SEQ ID NO: 37167 - RNA, 22 nt, Artificial Sequence
  Guide RNA
uaaaugcuuuggacaaguuacg

SEQ ID NO: 37168 - RNA, 22 nt, Artificial Sequence
  Guide RNA
uaacugauagguguucuacuuu

SEQ ID NO: 37169 - RNA, 22 nt, Artificial Sequence
  Guide RNA
uaacuuguccaaagcauuuagg

SEQ ID NO: 37170 - RNA, 22 nt, Artificial Sequence
  Guide RNA
uaagagauugugcaugacagug

SEQ ID NO: 37171 - RNA, 22 nt, Artificial Sequence
  Guide RNA
uaaggaaaauucacuagacaga

SEQ ID NO: 37172 - RNA, 22 nt, Artificial Sequence
  Guide RNA
uaagguguaaacuucuucuucu

SEQ ID NO: 37173 - RNA, 22 nt, Artificial Sequence
  Guide RNA
uaagugacuuggggccauguuu

SEQ ID NO: 37174 - RNA, 22 nt, Artificial Sequence
  Guide RNA
uaaguuggaaaauaaucggugu

SEQ ID NO: 37175 - RNA, 22 nt, Artificial Sequence
  Guide RNA
uaaucaaccaguacuuuuaagg

SEQ ID NO: 37176 - RNA, 22 nt, Artificial Sequence
  Guide RNA
uaaucggugucaguauuccgua

SEQ ID NO: 37177 - RNA, 22 nt, Artificial Sequence
  Guide RNA
uaauuccaguggccauugaugg

SEQ ID NO: 37178 - RNA, 22 nt, Artificial Sequence
  Guide RNA
uacaacaaauaauuccaguggc

SEQ ID NO: 37179 - RNA, 22 nt, Artificial Sequence
  Guide RNA
uacaccuuaaaaguacugguug

SEQ ID NO: 37180 - RNA, 22 nt, Artificial Sequence
  Guide RNA
uaccacauaaacugcugcuaaa

SEQ ID NO: 37181 - RNA, 22 nt, Artificial Sequence
  Guide RNA
uacggaauacugacaccgauua

SEQ ID NO: 37182 - RNA, 22 nt, Artificial Sequence
  Guide RNA
uacugacaccgauuauuuucca

SEQ ID NO: 37183 - RNA, 22 nt, Artificial Sequence
  Guide RNA
uacuggaagaugaauuccauca

SEQ ID NO: 37184 - RNA, 22 nt, Artificial Sequence
  Guide RNA
uacugguugauuaagugacuug

SEQ ID NO: 37185 - RNA, 22 nt, Artificial Sequence
  Guide RNA
uacuuaacuuuguugagacacu

SEQ ID NO: 37186 - RNA, 22 nt, Artificial Sequence
  Guide RNA
uacuucuuucuauagucuggau

SEQ ID NO: 37187 - RNA, 22 nt, Artificial Sequence
  Guide RNA
uagaaagugaaggguccccugu

SEQ ID NO: 37188 - RNA, 22 nt, Artificial Sequence
  Guide RNA
uagacagaagaagaaguuuaca

SEQ ID NO: 37189 - RNA, 22 nt, Artificial Sequence
  Guide RNA
uagauauuccuaaaugcuuugg

SEQ ID NO: 37190 - RNA, 22 nt, Artificial Sequence
  Guide RNA
uagcagcaguuuaugugguauu

SEQ ID NO: 37191 - RNA, 22 nt, Artificial Sequence
  Guide RNA
uaggauccagacuauagaaaga

SEQ ID NO: 37192 - RNA, 22 nt, Artificial Sequence
  Guide RNA
uagucaccaugaacacugucau

SEQ ID NO: 37193 - RNA, 22 nt, Artificial Sequence
  Guide RNA
uagucuggauccuaaguuggaa

SEQ ID NO: 37194 - RNA, 22 nt, Artificial Sequence
  Guide RNA
uauagucuggauccuaaguugg

SEQ ID NO: 37195 - RNA, 22 nt, Artificial Sequence
  Guide RNA
uaucucugaagggggaaaaguc

SEQ ID NO: 37196 - RNA, 22 nt, Artificial Sequence
  Guide RNA
uaugucaaauacuuucaggacg

SEQ ID NO: 37197 - RNA, 22 nt, Artificial Sequence
  Guide RNA
uaugugguauuucucuuaugug

SEQ ID NO: 37198 - RNA, 22 nt, Artificial Sequence
  Guide RNA
uauuccguaacuuguccaaagc

SEQ ID NO: 37199 - RNA, 22 nt, Artificial Sequence
  Guide RNA
uauuccuaaaugcuuuggacaa

SEQ ID NO: 37200 - RNA, 22 nt, Artificial Sequence
  Guide RNA
uauuugacauagaaagugaagg

SEQ ID NO: 37201 - RNA, 22 nt, Artificial Sequence
  Guide RNA
uauuuuccaacuuaggauccag

SEQ ID NO: 37202 - RNA, 22 nt, Artificial Sequence
  Guide RNA
ucaaauacuuucaggacguuuu

SEQ ID NO: 37203 - RNA, 22 nt, Artificial Sequence
  Guide RNA
ucaacaaaguugagccaaaaag

SEQ ID NO: 37204 - RNA, 22 nt, Artificial Sequence
  Guide RNA
ucaacaggggacccuucacuuu

SEQ ID NO: 37205 - RNA, 22 nt, Artificial Sequence
  Guide RNA
ucaaccaguacuuuuaaggugu

SEQ ID NO: 37206 - RNA, 22 nt, Artificial Sequence
  Guide RNA
ucaauaaggaaaccaacauuug

SEQ ID NO: 37207 - RNA, 22 nt, Artificial Sequence
  Guide RNA
ucaauggccacuggaauuauuu

SEQ ID NO: 37208 - RNA, 22 nt, Artificial Sequence
  Guide RNA
ucaccaugaacacugucaugca

SEQ ID NO: 37209 - RNA, 22 nt, Artificial Sequence
  Guide RNA
ucacuagacagaagaagaaguu

SEQ ID NO: 37210 - RNA, 22 nt, Artificial Sequence
  Guide RNA
ucacuuaaucaaccaguacuuu

SEQ ID NO: 37211 - RNA, 22 nt, Artificial Sequence
  Guide RNA
ucagagauagucaccaugaaca

SEQ ID NO: 37212 - RNA, 22 nt, Artificial Sequence
  Guide RNA
ucaguauuccguaacuugucca

SEQ ID NO: 37213 - RNA, 22 nt, Artificial Sequence
  Guide RNA
ucaucuuccaguaaacauggcc

SEQ ID NO: 37214 - RNA, 22 nt, Artificial Sequence
  Guide RNA
ucaugcacaaucucuuagaguu

SEQ ID NO: 37215 - RNA, 22 nt, Artificial Sequence
  Guide RNA
ucauggugacuaucucugaagg

SEQ ID NO: 37216 - RNA, 22 nt, Artificial Sequence
  Guide RNA
uccaaagcauuuaggaauaucu

SEQ ID NO: 37217 - RNA, 22 nt, Artificial Sequence
  Guide RNA
uccaacuuaggauccagacuau

SEQ ID NO: 37218 - RNA, 22 nt, Artificial Sequence
  Guide RNA
uccagacuauagaaagaaguaa

SEQ ID NO: 37219 - RNA, 22 nt, Artificial Sequence
  Guide RNA
uccaguaaacauggccccaagu

SEQ ID NO: 37220 - RNA, 22 nt, Artificial Sequence
  Guide RNA
uccaguggccauugauggaauu

SEQ ID NO: 37221 - RNA, 22 nt, Artificial Sequence
  Guide RNA
uccaucaauggccacuggaauu

SEQ ID NO: 37222 - RNA, 22 nt, Artificial Sequence
  Guide RNA
ucccccuucagagauagucacc

SEQ ID NO: 37223 - RNA, 22 nt, Artificial Sequence
  Guide RNA
uccccuguugacuuuucccccu

SEQ ID NO: 37224 - RNA, 22 nt, Artificial Sequence
  Guide RNA
uccccuuaauuuuacuaccuuc

SEQ ID NO: 37225 - RNA, 22 nt, Artificial Sequence
  Guide RNA
uccguaacuuguccaaagcauu

SEQ ID NO: 37226 - RNA, 22 nt, Artificial Sequence
  Guide RNA
uccuaaaugcuuuggacaaguu

SEQ ID NO: 37227 - RNA, 22 nt, Artificial Sequence
  Guide RNA
uccuaaguuggaaaauaaucgg

SEQ ID NO: 37228 - RNA, 22 nt, Artificial Sequence
  Guide RNA
uccugaaaguauuugacauaga

SEQ ID NO: 37229 - RNA, 22 nt, Artificial Sequence
  Guide RNA
ucggugucaguauuccguaacu

SEQ ID NO: 37230 - RNA, 22 nt, Artificial Sequence
  Guide RNA
ucuaaacucuaagagauugugc

SEQ ID NO: 37231 - RNA, 22 nt, Artificial Sequence
  Guide RNA
ucuaagagauugugcaugacag

SEQ ID NO: 37232 - RNA, 22 nt, Artificial Sequence
  Guide RNA
ucuacaacaaauaauuccagug

SEQ ID NO: 37233 - RNA, 22 nt, Artificial Sequence
  Guide RNA
ucuauagucuggauccuaaguu

SEQ ID NO: 37234 - RNA, 22 nt, Artificial Sequence
  Guide RNA
ucuaugucaaauacuuucagga

SEQ ID NO: 37235 - RNA, 22 nt, Artificial Sequence
  Guide RNA
ucucugaagggggaaaagucaa

SEQ ID NO: 37236 - RNA, 22 nt, Artificial Sequence
  Guide RNA
ucucuuaugugcaauuagcaca

SEQ ID NO: 37237 - RNA, 22 nt, Artificial Sequence
  Guide RNA
ucugaagggggaaaagucaaca

SEQ ID NO: 37238 - RNA, 22 nt, Artificial Sequence
  Guide RNA
ucuggauccuaaguuggaaaau

SEQ ID NO: 37239 - RNA, 22 nt, Artificial Sequence
  Guide RNA
ucuuaugugcaauuagcacaaa

SEQ ID NO: 37240 - RNA, 22 nt, Artificial Sequence
  Guide RNA
ucuuccaguaaacauggcccca

SEQ ID NO: 37241 - RNA, 22 nt, Artificial Sequence
  Guide RNA
ucuucuucugucuagugaauuu

SEQ ID NO: 37242 - RNA, 22 nt, Artificial Sequence
  Guide RNA
ucuucuuuugaaacugacauug

SEQ ID NO: 37243 - RNA, 22 nt, Artificial Sequence
  Guide RNA
ucuuucuauagucuggauccua

SEQ ID NO: 37244 - RNA, 22 nt, Artificial Sequence
  Guide RNA
ucuuuugaaacugacauugcuu

SEQ ID NO: 37245 - RNA, 22 nt, Artificial Sequence
  Guide RNA
ugaaacugacauugcuuuuagc

SEQ ID NO: 37246 - RNA, 22 nt, Artificial Sequence
  Guide RNA
ugaacacugucaugcacaaucu

SEQ ID NO: 37247 - RNA, 22 nt, Artificial Sequence
  Guide RNA
ugaagggggaaaagucaacagg

SEQ ID NO: 37248 - RNA, 22 nt, Artificial Sequence
  Guide RNA
ugaaggguccccuguugacuuu

SEQ ID NO: 37249 - RNA, 22 nt, Artificial Sequence
  Guide RNA
ugaauuccaucaauggccacug

SEQ ID NO: 37250 - RNA, 22 nt, Artificial Sequence
  Guide RNA
ugacaccgauuauuuuccaacu

SEQ ID NO: 37251 - RNA, 22 nt, Artificial Sequence
  Guide RNA
ugacaguguucauggugacuau

SEQ ID NO: 37252 - RNA, 22 nt, Artificial Sequence
  Guide RNA
ugacauagaaagugaagggucc

SEQ ID NO: 37253 - RNA, 22 nt, Artificial Sequence
  Guide RNA
ugacauugcuuuuagcagcagu

SEQ ID NO: 37254 - RNA, 22 nt, Artificial Sequence
  Guide RNA
ugacuaucucugaagggggaaa

SEQ ID NO: 37255 - RNA, 22 nt, Artificial Sequence
  Guide RNA
ugacucaacaaaguugagccaa

SEQ ID NO: 37256 - RNA, 22 nt, Artificial Sequence
  Guide RNA
ugacuuggggccauguuuacug

SEQ ID NO: 37257 - RNA, 22 nt, Artificial Sequence
  Guide RNA
ugacuuuucccccuucagagau

SEQ ID NO: 37258 - RNA, 22 nt, Artificial Sequence
  Guide RNA
ugagacacuuuuuggcucaacu

SEQ ID NO: 37259 - RNA, 22 nt, Artificial Sequence
  Guide RNA
ugagccaaaaagugucucaaca

SEQ ID NO: 37260 - RNA, 22 nt, Artificial Sequence
  Guide RNA
ugauggaauucaucuuccagua

SEQ ID NO: 37261 - RNA, 22 nt, Artificial Sequence
  Guide RNA
ugauuaagugacuuggggccau

SEQ ID NO: 37262 - RNA, 22 nt, Artificial Sequence
  Guide RNA
ugcacaaucucuuagaguuuag

SEQ ID NO: 37263 - RNA, 22 nt, Artificial Sequence
  Guide RNA
ugcacauaagagaaauaccaca

SEQ ID NO: 37264 - RNA, 22 nt, Artificial Sequence
  Guide RNA
ugcaugacaguguucaugguga

SEQ ID NO: 37265 - RNA, 22 nt, Artificial Sequence
  Guide RNA
ugcuaaaagcaaugucaguuuc

SEQ ID NO: 37266 - RNA, 22 nt, Artificial Sequence
  Guide RNA
ugcuaauugcacauaagagaaa

SEQ ID NO: 37267 - RNA, 22 nt, Artificial Sequence
  Guide RNA
ugcuaauuuaaaaacguccuga

SEQ ID NO: 37268 - RNA, 22 nt, Artificial Sequence
  Guide RNA
ugcugcuaaaagcaaugucagu

SEQ ID NO: 37269 - RNA, 22 nt, Artificial Sequence
  Guide RNA
ugcuuuggacaaguuacggaau

SEQ ID NO: 37270 - RNA, 22 nt, Artificial Sequence
  Guide RNA
ugcuuuuagcagcaguuuaugu

SEQ ID NO: 37271 - RNA, 22 nt, Artificial Sequence
  Guide RNA
uggaaaauaaucggugucagua

SEQ ID NO: 37272 - RNA, 22 nt, Artificial Sequence
  Guide RNA
uggaagaugaauuccaucaaug

SEQ ID NO: 37273 - RNA, 22 nt, Artificial Sequence
  Guide RNA
uggaauucaucuuccaguaaac

SEQ ID NO: 37274 - RNA, 22 nt, Artificial Sequence
  Guide RNA
uggacaaguuacggaauacuga

SEQ ID NO: 37275 - RNA, 22 nt, Artificial Sequence
  Guide RNA
uggauccuaaguuggaaaauaa

SEQ ID NO: 37276 - RNA, 22 nt, Artificial Sequence
  Guide RNA
uggcaaaacuguauaaaagugc

SEQ ID NO: 37277 - RNA, 22 nt, Artificial Sequence
  Guide RNA
uggccacuggaauuauuuguug

SEQ ID NO: 37278 - RNA, 22 nt, Artificial Sequence
  Guide RNA
uggccauugauggaauucaucu

SEQ ID NO: 37279 - RNA, 22 nt, Artificial Sequence
  Guide RNA
uggccccaagucacuuaaucaa

SEQ ID NO: 37280 - RNA, 22 nt, Artificial Sequence
  Guide RNA
uggcucaacuuuguugagucau

SEQ ID NO: 37281 - RNA, 22 nt, Artificial Sequence
  Guide RNA
uggggccauguuuacuggaaga

SEQ ID NO: 37282 - RNA, 22 nt, Artificial Sequence
  Guide RNA
ugguauuucucuuaugugcaau

SEQ ID NO: 37283 - RNA, 22 nt, Artificial Sequence
  Guide RNA
uggugacuaucucugaaggggg

SEQ ID NO: 37284 - RNA, 22 nt, Artificial Sequence
  Guide RNA
ugguugauuaagugacuugggg

SEQ ID NO: 37285 - RNA, 22 nt, Artificial Sequence
  Guide RNA
uguaaacuucuucuucugucua

SEQ ID NO: 37286 - RNA, 22 nt, Artificial Sequence
  Guide RNA
ugucaaauacuuucaggacguu

SEQ ID NO: 37287 - RNA, 22 nt, Artificial Sequence
  Guide RNA
ugucaguauuccguaacuuguc

SEQ ID NO: 37288 - RNA, 22 nt, Artificial Sequence
  Guide RNA
ugucaugcacaaucucuuagag

SEQ ID NO: 37289 - RNA, 22 nt, Artificial Sequence
  Guide RNA
uguccaaagcauuuaggaauau

SEQ ID NO: 37290 - RNA, 22 nt, Artificial Sequence
  Guide RNA
ugugcaugacaguguucauggu

SEQ ID NO: 37291 - RNA, 22 nt, Artificial Sequence
  Guide RNA
ugugcuaauugcacauaagaga

SEQ ID NO: 37292 - RNA, 22 nt, Artificial Sequence
  Guide RNA
ugugguauuucucuuaugugca

SEQ ID NO: 37293 - RNA, 22 nt, Artificial Sequence
  Guide RNA
uguucauggugacuaucucuga

SEQ ID NO: 37294 - RNA, 22 nt, Artificial Sequence
  Guide RNA
uguugacuuuucccccuucaga

SEQ ID NO: 37295 - RNA, 22 nt, Artificial Sequence
  Guide RNA
uguugagacacuuuuuggcuca

SEQ ID NO: 37296 - RNA, 22 nt, Artificial Sequence
  Guide RNA
uguuuacuggaagaugaauucc

SEQ ID NO: 37297 - RNA, 22 nt, Artificial Sequence
  Guide RNA
uuaaaguagaacaccuaucagu

SEQ ID NO: 37298 - RNA, 22 nt, Artificial Sequence
  Guide RNA
uuaacugauagguguucuacuu

SEQ ID NO: 37299 - RNA, 22 nt, Artificial Sequence
  Guide RNA
uuaagguguaaacuucuucuuc

SEQ ID NO: 37300 - RNA, 22 nt, Artificial Sequence
  Guide RNA
uuaagugacuuggggccauguu

SEQ ID NO: 37301 - RNA, 22 nt, Artificial Sequence
  Guide RNA
uuacaccuuaaaaguacugguu

SEQ ID NO: 37302 - RNA, 22 nt, Artificial Sequence
  Guide RNA
uuacggaauacugacaccgauu

SEQ ID NO: 37303 - RNA, 22 nt, Artificial Sequence
  Guide RNA
uuacuggaagaugaauuccauc

SEQ ID NO: 37304 - RNA, 22 nt, Artificial Sequence
  Guide RNA
uuacuucuuucuauagucugga

SEQ ID NO: 37305 - RNA, 22 nt, Artificial Sequence
  Guide RNA
uuagcagcaguuuaugugguau

SEQ ID NO: 37306 - RNA, 22 nt, Artificial Sequence
  Guide RNA
uuaggauccagacuauagaaag

SEQ ID NO: 37307 - RNA, 22 nt, Artificial Sequence
  Guide RNA
uuauuuuccaacuuaggaucca

SEQ ID NO: 37308 - RNA, 22 nt, Artificial Sequence
  Guide RNA
uucacuagacagaagaagaagu

SEQ ID NO: 37309 - RNA, 22 nt, Artificial Sequence
  Guide RNA
uucagagauagucaccaugaac

SEQ ID NO: 37310 - RNA, 22 nt, Artificial Sequence
  Guide RNA
uucaucuuccaguaaacauggc

SEQ ID NO: 37311 - RNA, 22 nt, Artificial Sequence
  Guide RNA
uucauggugacuaucucugaag

SEQ ID NO: 37312 - RNA, 22 nt, Artificial Sequence
  Guide RNA
uuccaacuuaggauccagacua

SEQ ID NO: 37313 - RNA, 22 nt, Artificial Sequence
  Guide RNA
uuccaguaaacauggccccaag

SEQ ID NO: 37314 - RNA, 22 nt, Artificial Sequence
  Guide RNA
uuccaguggccauugauggaau

SEQ ID NO: 37315 - RNA, 22 nt, Artificial Sequence
  Guide RNA
uuccaucaauggccacuggaau

SEQ ID NO: 37316 - RNA, 22 nt, Artificial Sequence
  Guide RNA
uucccccuucagagauagucac

SEQ ID NO: 37317 - RNA, 22 nt, Artificial Sequence
  Guide RNA
uuccguaacuuguccaaagcau

SEQ ID NO: 37318 - RNA, 22 nt, Artificial Sequence
  Guide RNA
uuccuaaaugcuuuggacaagu

SEQ ID NO: 37319 - RNA, 22 nt, Artificial Sequence
  Guide RNA
uucuaaacucuaagagauugug

SEQ ID NO: 37320 - RNA, 22 nt, Artificial Sequence
  Guide RNA
uucuauagucuggauccuaagu

SEQ ID NO: 37321 - RNA, 22 nt, Artificial Sequence
  Guide RNA
uucuaugucaaauacuuucagg

SEQ ID NO: 37322 - RNA, 22 nt, Artificial Sequence
  Guide RNA
uucucuuaugugcaauuagcac

SEQ ID NO: 37323 - RNA, 22 nt, Artificial Sequence
  Guide RNA
uucuucugucuagugaauuuuc

SEQ ID NO: 37324 - RNA, 22 nt, Artificial Sequence
  Guide RNA
uucuucuucugucuagugaauu

SEQ ID NO: 37325 - RNA, 22 nt, Artificial Sequence
  Guide RNA
uucuuucuauagucuggauccu

SEQ ID NO: 37326 - RNA, 22 nt, Artificial Sequence
  Guide RNA
uucuuuugaaacugacauugcu

SEQ ID NO: 37327 - RNA, 22 nt, Artificial Sequence
  Guide RNA
uugaaacugacauugcuuuuag

SEQ ID NO: 37328 - RNA, 22 nt, Artificial Sequence
  Guide RNA
uugacauagaaagugaaggguc

SEQ ID NO: 37329 - RNA, 22 nt, Artificial Sequence
  Guide RNA
uugacuuuucccccuucagaga

SEQ ID NO: 37330 - RNA, 22 nt, Artificial Sequence
  Guide RNA
uugagacacuuuuuggcucaac

SEQ ID NO: 37331 - RNA, 22 nt, Artificial Sequence
  Guide RNA
uugagccaaaaagugucucaac

SEQ ID NO: 37332 - RNA, 22 nt, Artificial Sequence
  Guide RNA
uugauggaauucaucuuccagu

SEQ ID NO: 37333 - RNA, 22 nt, Artificial Sequence
  Guide RNA
uugauuaagugacuuggggcca

SEQ ID NO: 37334 - RNA, 22 nt, Artificial Sequence
  Guide RNA
uugcacauaagagaaauaccac

SEQ ID NO: 37335 - RNA, 22 nt, Artificial Sequence
  Guide RNA
uugcuuuuagcagcaguuuaug

SEQ ID NO: 37336 - RNA, 22 nt, Artificial Sequence
  Guide RNA
uuggaaaauaaucggugucagu

SEQ ID NO: 37337 - RNA, 22 nt, Artificial Sequence
  Guide RNA
uuggacaaguuacggaauacug

SEQ ID NO: 37338 - RNA, 22 nt, Artificial Sequence
  Guide RNA
uuggcaaaacuguauaaaagug

SEQ ID NO: 37339 - RNA, 22 nt, Artificial Sequence
  Guide RNA
uuggcucaacuuuguugaguca

SEQ ID NO: 37340 - RNA, 22 nt, Artificial Sequence
  Guide RNA
uuggggccauguuuacuggaag

SEQ ID NO: 37341 - RNA, 22 nt, Artificial Sequence
  Guide RNA
uuguccaaagcauuuaggaaua

SEQ ID NO: 37342 - RNA, 22 nt, Artificial Sequence
  Guide RNA
uugugcaugacaguguucaugg

SEQ ID NO: 37343 - RNA, 22 nt, Artificial Sequence
  Guide RNA
uugugcuaauugcacauaagag

SEQ ID NO: 37344 - RNA, 22 nt, Artificial Sequence
  Guide RNA
uuguugagacacuuuuuggcuc

SEQ ID NO: 37345 - RNA, 22 nt, Artificial Sequence
  Guide RNA
uuuaaaguagaacaccuaucag

SEQ ID NO: 37346 - RNA, 22 nt, Artificial Sequence
  Guide RNA
uuuaacugauagguguucuacu

SEQ ID NO: 37347 - RNA, 22 nt, Artificial Sequence
  Guide RNA
uuuacaccuuaaaaguacuggu

SEQ ID NO: 37348 - RNA, 22 nt, Artificial Sequence
  Guide RNA
uuuacuggaagaugaauuccau

SEQ ID NO: 37349 - RNA, 22 nt, Artificial Sequence
  Guide RNA
uuuagcagcaguuuauguggua

SEQ ID NO: 37350 - RNA, 22 nt, Artificial Sequence
  Guide RNA
uuuccaacuuaggauccagacu

SEQ ID NO: 37351 - RNA, 22 nt, Artificial Sequence
  Guide RNA
uuucccccuucagagauaguca

SEQ ID NO: 37352 - RNA, 22 nt, Artificial Sequence
  Guide RNA
uuucuauagucuggauccuaag

SEQ ID NO: 37353 - RNA, 22 nt, Artificial Sequence
  Guide RNA
uuucucuuaugugcaauuagca

SEQ ID NO: 37354 - RNA, 22 nt, Artificial Sequence
  Guide RNA
uuugacauagaaagugaagggu

SEQ ID NO: 37355 - RNA, 22 nt, Artificial Sequence
  Guide RNA
uuuggacaaguuacggaauacu

SEQ ID NO: 37356 - RNA, 22 nt, Artificial Sequence
  Guide RNA
uuuggcucaacuuuguugaguc

SEQ ID NO: 37357 - RNA, 22 nt, Artificial Sequence
  Guide RNA
uuugugcuaauugcacauaaga

SEQ ID NO: 37358 - RNA, 22 nt, Artificial Sequence
  Guide RNA
uuuguugagacacuuuuuggcu

SEQ ID NO: 37359 - RNA, 22 nt, Artificial Sequence
  Guide RNA
uuuuaacugauagguguucuac

SEQ ID NO: 37360 - RNA, 22 nt, Artificial Sequence
  Guide RNA
uuuuagcagcaguuuauguggu

SEQ ID NO: 37361 - RNA, 22 nt, Artificial Sequence
  Guide RNA
uuuuccaacuuaggauccagac

SEQ ID NO: 37362 - RNA, 22 nt, Artificial Sequence
  Guide RNA
uuuucccccuucagagauaguc

SEQ ID NO: 37363 - RNA, 22 nt, Artificial Sequence
  Guide RNA
uuuuggcucaacuuuguugagu

SEQ ID NO: 37364 - RNA, 22 nt, Artificial Sequence
  Guide RNA
uuuugugcuaauugcacauaag

SEQ ID NO: 37365 - RNA, 22 nt, Artificial Sequence
  Guide RNA
uuuuuggcucaacuuuguugag

SEQ ID NO: 37366 - DNA, 60 bp, Artificial Sequence
  STAT1 cDNA Exon 3 Editing Primer F NGS
  misc_feature (34)..(36): n is a, c, g, or t
tcgtcggcagcgtcagatgtgtataagagacagnnngtgggaggtctatataagcagagc

SEQ ID NO: 37367 - DNA, 57 bp, Artificial Sequence
  STAT1 cDNA Exon 3 Editing Primer R NGS
  misc_feature (35)..(37): n is a, c, g, or t
gtctcgtgggctcggagatgtgtataagagacagnnncatccagctgtgacaggagg

SEQ ID NO: 37368 - DNA, 20 bp, Artificial Sequence
  STAT1 guide17Alt guide RNA
gaaaactgtcatcatagagc

SEQ ID NO: 37369 - DNA, 20 bp, Artificial Sequence
  CXCL10 Primer F qPCR
tgatggccttcgattctgga

SEQ ID NO: 37370 - DNA, 20 bp, Artificial Sequence
  CXCL10 Primer R qPCR
aactgtacgctgtacctgca

SEQ ID NO: 37371 - DNA, 20 bp, Artificial Sequence
  CXCL11 Primer F qPCR
gagtgtgaagggcatggcta

SEQ ID NO: 37372 - DNA, 20 bp, Artificial Sequence
  CXCL11 Primer R qPCR
atgcaaagacagcgtcctct

SEQ ID NO: 37373 - DNA, 22 bp, Artificial Sequence
  GAPDH Primer F qPCR
cacacacatgcacttacctgtg

SEQ ID NO: 37374 - DNA, 20 bp, Artificial Sequence
  GAPDH Primer R qPCR
atttgccaagttgcctgtcc

SEQ ID NO: 37375 - DNA, 20 bp, Artificial Sequence
  GBP1 Primer F qPCR
ggtccagttgctgaaagagc

SEQ ID NO: 37376 - DNA, 20 bp, Artificial Sequence
  GBP1 Primer R qPCR
tgacaggaaggctctggtct

SEQ ID NO: 37377 - DNA, 20 bp, Artificial Sequence
  IRF1 Primer F qPCR
agctcagctgtgcgagtgta

SEQ ID NO: 37378 - DNA, 20 bp, Artificial Sequence
  IRF1 Primer R qPCR
tagctgctgtggtcatcagg

SEQ ID NO: 37379 - DNA, 20 bp, Artificial Sequence
  UBD Primer F qPCR
ctctggtttctggccccttg

SEQ ID NO: 37380 - DNA, 20 bp, Artificial Sequence
  UBD Primer R qPCR
cgctgtcatatgggttggca

SEQ ID NO: 37381 - DNA, 24 bp, Artificial Sequence
  PDL1 Primer F qPCR
gacacctggctgcactaattgtct

SEQ ID NO: 37382 - DNA, 22 bp, Artificial Sequence
  PDL1 Primer R qPCR
agctgtatggttttcctcagga

SEQ ID NO: 37383 - RNA, 20 nt, Artificial Sequence
  Guide RNA
aaaaaaauguacuugguucc

SEQ ID NO: 37384 - RNA, 17 nt, Artificial Sequence
  Guide RNA
aaaauguacuugguucc

SEQ ID NO: 37385 - RNA, 17 nt, Artificial Sequence
  Guide RNA
aaaaauguacuugguuc

SEQ ID NO: 37386 - RNA, 17 nt, Artificial Sequence
  Guide RNA
aaaaaauguacuugguu

SEQ ID NO: 37387 - RNA, 17 nt, Artificial Sequence
  RNA Guide
aaaaaaauguacuuggu

SEQ ID NO: 37388 - DNA, 20 bp, Artificial Sequence
  gSTAT1_8
atgaggataactagctttat

SEQ ID NO: 37389 - DNA, 20 bp, Artificial Sequence
  gSTAT1_9
agcagatatgctggaccgtc

SEQ ID NO: 37390 - DNA, 20 bp, Artificial Sequence
  gSTAT1_10
tatgctggaccgtcaggcaa

SEQ ID NO: 37391 - DNA, 20 bp, Artificial Sequence
  gSTAT1_11
atgctggaccgtcaggcaat

SEQ ID NO: 37392 - DNA, 20 bp, Artificial Sequence
  gSTAT1_12
gagcatgtttccagggtggg

SEQ ID NO: 37393 - DNA, 20 bp, Artificial Sequence
  gSTAT1_13
agagagcatgtttccagggt

SEQ ID NO: 37394 - DNA, 20 bp, Artificial Sequence
  gSTAT1_14
gagagagcatgtttccaggg

SEQ ID NO: 37395 - DNA, 20 bp, Artificial Sequence
  gSTAT1_15
aaagagagagcatgtttcca

SEQ ID NO: 37396 - DNA, 20 bp, Artificial Sequence
  gSTAT1_16
aaaagagagagcatgtttcc

SEQ ID NO: 37397 - DNA, 20 bp, Artificial Sequence
  gSTAT1_17
gaaaactgtcatcataaagc

SEQ ID NO: 37398 - DNA, 20 bp, Artificial Sequence
  gSTAT1_18
aaagctggtgaacctgctcc

SEQ ID NO: 37399 - DNA, 20 bp, Artificial Sequence
  gSTAT1_19
gatgctgtagaaaacataaa

SEQ ID NO: 37400 - DNA, 20 bp, Artificial Sequence
  gSTAT1_20
tggacaactgctcactccat

SEQ ID NO: 37401 - DNA, 20 bp, Artificial Sequence
  gSTAT1_21
aactgctcactccattggaa

SEQ ID NO: 37402 - DNA, 20 bp, Artificial Sequence
  gSTAT1_22
gtatggtaggttataccacc

SEQ ID NO: 37403 - DNA, 20 bp, Artificial Sequence
  gSTAT1_25
tgacttggggccatgtttac

SEQ ID NO: 37404 - DNA, 20 bp, Artificial Sequence
  gSTAT1_26
taaatgctttggacaagtta

SEQ ID NO: 37405 - DNA, 20 bp, Artificial Sequence
  gSTAT1_27
ctggttgattaagtgacttg

SEQ ID NO: 37406 - DNA, 20 bp, Artificial Sequence
  gSTAT1_28
tactggttgattaagtgact

SEQ ID NO: 37407 - DNA, 20 bp, Artificial Sequence
  gSTAT1_29
ataattccagtggccattga
